United States Patent Application Publication US 2026/0109938 A1 - sequence listing, part 8

SEQ ID NO: 4 - DNA, 3977488 bp, Escherichia coli (residues 1,988,745-3,977,488 of 3,977,488)
  source 1..3977488: mol_type = genomic DNA
ccgccgtaatggtctgggtgatttggggcgtgatcgttaatgcctggtttattccagaaattgccagccagttcttcaccatgggtctggtgattggcatcatcggcgttgttttccgccttaacggcatgacggttaataccatggctagttcctttaccgaaggggcgcgaatgatgatcgcccctgccctgctggtgggtttcgccaaagggattttgctgctggtcggtaatggtgaagcgggtgatgccagcgtgttaaataccatcctcaacagcattgccaatgccattagcggtctggacaacgcggtcgcggcctggtttatgttgctcttccaggcggtatttaatttcttcgtgacgtccggttctggtcaggcggcgttaaccatgccgttactggcaccgcttggcgatctggtcggtgttaaccgtcaggttaccgtgctggcgttccagtttggtgatggcttcagtcacatcatttacccaaccagtgcgagcttaatggcaacgctcggtgtgtgcagggtggacttccgtaactggctgaaggtgggcgcgaccctacttggactgctgtttattatgtccagcgtcgtagtgatcggcgctcagttgatgggctaccactaaaaatgttaagagccgcaattgcggctcttttttcattctgccgtttcagtctctacggcttcatttttggcattgcgcttcatccacaacgctagcgctttcaggctgtctggagtgaactcatcgcagcgtgcggtgatttcttccggcgtcagccagcaaacttcactgacttcatcttcctgtagtgcgaagggaccgtgagagacgcagctgaacaatgcgccccagacacggcaatttttatcttcgaaatagaactgcccgtgctcggcaaaggggacaccggcaatgcccaactcttcttccgcttcgcgacgcgcggattccagcagttgctcatcggcctggactacaccgcctgcggtcgcatctaacatgccgggtaaaaagtcttttgtctcggtacgacgctggaccagaattttgcccatgccatcatgcacgacgatgtaagttgcacgatgacgcagacactgtgcccgcatttgttcccggctggcttgtgcaatgacttcgttctcttcattgacaatatccacccattcagtacttgccaaacgacgctgttccattatcaggaaaccttctttttctggcgctcttacggcgcattttgagttgtgggtaaattacggattaatcgcgacctgcgcaatgatactttgatcattgagtgcgattacactaagtacgtcattatccagcatgccataactcgccggattaccgcctttcggaatactcacgctgccggggttgaagtggaaaatctccccccgctgttctgccactggcagatgggtatgaccgtacaccagcacatcgttctggtttaaagcaggcagattttccgggccaaaaagatgaccatgcgtcaaaaacagacgttgtttttccagtaatacctgttgccacggcgcggttatcgggaaatgcagcagcatttgatccacttcgctgtcgcagttgccgcgcacagcgataaccttatgtgccacttcattaagccgttcagcgactttggctggcgcgtaaccctccggtaaagcattacgcgggccgtgattcaacacgtcgccaaggatcaccagccactgggcaccgctttgggcaaacaactccagaacacgttccgtcgccggtaagctcccatgaatgtcgcttgcaaacatcagtttcatcactcactcctcgtcgaaaaaacgtaagctatgatactggattctgtcgttgctatcagccagattgcttcgcgctaagtgcaataaaacgctggacagacgctcgctgccactggaatgttgcataatccaccaggcgttctggcacctcatcgccatgtagtaccaggcggttaatcattagcgccagatcagtatcagcaatgcaccattcaccaaataaattcggctgacccagtactaacaaatgttctgccatcgcgaacagtttctctgcactggcttttccctcggccgttagtggcgcttttttcgcccccgcaaagacaacatccgtcggacgctcttcgcggatgggcatcagatcgctgcgcagccaggcctgaatctgtcgtgcacgcgcacgattttctaaatcaagcggataaatacgttcccaggtcggtgacgcaaatcgatcttccagatactccgcaatggcagaagattcactcaactcaaaatcatcgatttgtaataacggcacacggcgtgtctgaccgtaaccttgccacgtcggctgcaaatgttcaccgctgtcgaggtcgatggtcttgatatgaaagctcaggcctttttcctgcaacgccacccaggcggataacacataaggggagaaaaagtgggcatcactccaaagcgtgatagcgggtttactcattatgtcctcggcaataaagggggctggctatcaaactatagagcctttttgtcactgtcacgtgacgaatactcacgtaagtcgccgcgctttctatacttgtggtgttcagatgattaaacaaccggagctgcaatgatcgatctctatttcgccccgacacccaatggtcacaaaattacgctgtttctcgaagaagcagagctggattatcgcttgattaaggtagacctggggaaaggcggtcagtttcgtccggaatttttgcgcattagccccaacaacaaaattccggcaattgttgatcattctcctgccgatggcggcgaaccgctaagcctctttgagtctggtgccattttgttgtatctggctgagaaaacaggactctttttgagtcatgaaacgcgtgagcgcgccgccacattacagtggttattctggcaggtaggcggactggggccgatgcttgggcaaaatcatcattttaatcacgcagccccccaaaccattccttacgctattgaacgttatcaggttgaaactcagcgtctttaccatgtactgaacaagcggctggaaaacagcccctggctgggaggcgagaactacagcattgcggatattgcctgctggccgtgggttaatgcctggactcgccagcgaattgacctagcaatgtatccggcagtcaagaactggcatgagcggatccgtagccgccctgccaccgggcaggcactgctaaaagcacaactcggtgatgagcgtagcgatagttaacagaaacaggttctcgtgtattatttcatcctaagtaaaacaacggagaacctgcaatggcacaacctgccgctattattcgtataaagaaccttcgtttgcgtacgtttatcggaattaaggaagaagaaattaacaaccgtcaggatattgttatcaatgtgacgatccactaccccgccgataaagcgcgcactagcgaagatatcaacgatgcgctgaattatcgcaccgtaacgaaaaacattattcagcatgtagagaataaccgtttctctttgctggaaaaattaactcaggatgtgctcgatatcgcacgtgaacatcactgggtgacgtatgctgaagtggagatcgataaactgcacgcgctgcgctacgccgatagcgtatccatgaccttaagctggcagcgttaatcgccatatcgggaggctgcatgaacatagtgatcaccggagggacaggattaattggtcgccatttgattccgcgtttgctggagctgggccatcaaattacggtagtgacgcgtaacccgcagaaagccagttccgttctcggccctcgggtgacactatggcaagggcttgccgatcaaagcaacctcaacggcgttgatgcggtaatcaacctggccggagaaccgattgctgataaacgctggactcacgagcaaaaagagcgtctctgccaaagccgctggaatatcacgcaaaaactggtcgatttgattaatgccagcgacacgccaccgagcgtactcatttccggcagcgcaacgggctattatggtgacttaggtgaagtggtggttaccgaagaggaaccgccgcataacgaatttacccataaactctgcgctcgctgggaagaaattgcctgccgggcgcaaagtgacaaaacgcgagtgtgcctgctgcgtaccggtgtagtgctggcaccggatggcggtattctcggtaaaatgctgccgccgtttcgtcttggcctgggcgggccgattggctctggtcggcagtatctggcctggattcatattgatgatatggtcaacggtattctctggctgctggataacgagctgcgcgggccatttaatatggttagcccctacccggtacgcaatgaacaatttgcccatgcgctcggtcatgcgctgcatcgcccggccattttgcgcgtccccgcgaccgccattcgactgttaatgggcgaatctagtgtactggtattaggtggacaacgcgcgctgcctaaacggctggaagaagcgggttttgcgtttcgctggtacgatttagaagaggcgctggcggatgtcgttcgctgatgtggtttacagcaaacatccgccagttaactcccggtgttacaggattagtggctttgcgcgataagatcgtctggactaagtcgggtcaccatcataactaactctctgtctaaacctctatccagcatctcctgagcaatacgcagggcttcttcgtgtttgccctgcattgcgccttcttcacgtaatctgtcagcaatggtcatcagtttctccttttcttgtggtgcgcgttccgctatctcaccaataaatgcacgaaaacgctgggcatcccctgtttgtaatacgtaattaaacagggcttttagctgtctgtcattagtgttccctgtaactagcaggctaacaatttggtcgactaatcccaacagatcgcgctgacgaatatgtttctgaattaactccaacagcgccattttgcggtgttgcataatctcgtcatccggcaccacggtaatatccaccaacggaaaagcgctactatatattttgcgggctatagcaggctcggcaaattcatcaagccagcagagactataaggataaggacttctgcaaccatgataaaacagcatcgggagcaccaatggaagctctttatagcccgcatcaagatggttttgcattgccgcaatggaataacgcatcatgcgaaaagccattaattcttccggcttactttggtgctctatcactacataaatataacccactccctcctgcgttttcacagaccacaagaggtcggaataatattgccgcaggtcttcatcaataaaactgtttggttccagtttaagcgtcgttaaatcacacagtttgcgcagcggcgcgggaagatgaatatcaataaaatcccgcgcggtgtctggatggcgtaaaaaagatttaaataccgcatcatgcggcgtggaagttgtgcttattgtcatggcgttccgtcacccctcaaatttaagatgacgcgacaataaccacgattaacacccaatgcagcaggcagtttttatctttggacagcgaattcagaagtatttttagcggactgtaacttttacatttcagcggaagctgactcgcaaattccccatgaaaatactccggcagcgttagccaccggagaggaaattatttcaggcttcccttaaggaaccgttgcagacgagggctttgcgggttgccaaataactgctccggcgcgccctcttcttctattttcccctgatggaggaaaatgacatgagtagaaacatggcgagcaaagcccatttcgtgagtcactaccaccatggttttcccctcttctgccagttgctgcataatacgcaacacttcgcctaccagttcaggatcgagcgcgctggtaggttcatcaaacagtaaaacttccggttccatcgccagcgcccgcgcgatagaaacacgctgttgctgaccgccggaaagatgcaccggatatttcccctgcgcacgttcgtctatcccgacttttgccagatacttcaccgcccgctcgcgcgcttcctgcttgctcaggcccaacacctgaatcggcgcttccatgacgttttccagcaccgtcatatggctccagagattgaagtgctggaataccatcgtcaggcgtgtgcgcagtaagcgcagttgatttttatcggcgactttgagttgaccgtctttgtcgcgcaccagattgatcgtctggccattgaccacgatgctcccttcactcggtttttcgaggaagttaatgcagcgcagaaaggtacttttcccgcttccgctgcttccgatgatgcttattacatctccggcattcgcttgcagacttacccctttcagcacttcatgttcgccgtagcgtttgtgcaaatcgataacgtttaatttattctcggacatcgtattctcagtgcgtactagaaggtttcacatgctgcaaccagcgtttttccgctctgcgaaagaggctgatcaggacataagagatgattaaatagagcaccgcggcaatgccgaaggcggtaaaaggttgatacgtggcggcgttaatatcgcgggctattttcagcagatccggcaccgtggcagtaaatgccaacgcagtagagtgcagcatcaggatcacttcgttgctgtatgccggtaacgcaatacgcagcgcagaaggcaaaataatgcagcgatacattttaaaagtgctgaagccataggctctggcggcttcaatttccccatgcggaacgctacggattgccccagcaaaaatctcggtagtgtaagcgcaggtgttaagcgtcagcgccagcacggtacagttcaggccactgcggaagaaagcgttaaggaattcggttcccttaacaatctcaagcgtgtacatgccggaatagaacaccagcaactgaacatacagcggcgtaccgcgaaaaatataggtaaataaccagattggaaactggatgtatttattactggagacacgaccaatcgccagaaacagcgccaggactccgcctatcactacgctcaaaataagcagccacagagtgatcgccacaccagtaaagcgataaccgtcggtccacagcagcggtttccagtattcatgtaagatttcgatcacaggtcagccctcttcacacccacggagtagcggcgctcaaggaacagcagcacaccattggaaacagtggtgaaaaccaggtaaatcacgccacagacgatggcgaaatagaacggttcccaggtacttttgcctgccagttgggtggctttgaccacatcttccaggccgagtaagctaaccagtgcggtagatttgaggatcacctgccagttgttgccaatgcctggcagggcgtaacgcatcatgctcggaaacatgatccgccgaaacacttgcccacgagtaaaaccgaacgccgtcgccgcctctatatgtcctttcggcactgccataaaagcaccacggaacgtttcggtaaaataagcaccgtagataaaaccgagagtgataataccagcgaccatcggatcgatatcaatctgcccgacgcccatcgcctccgtcaccgtgtttagcgcaatctgcaaaccgtagaaaatcagcagcatcaacactaagtccggcacgccacgaatcagcgtggtgtacccttcgaaaatcagcccgctaagccgattttggctgagcttaccgccagcgccaattaaaccgatgattacagcgagcactacagagctgatagccagctccagcgtgacgagcgcaccctgtaaaataacaccactaaacccatacaacatgctgcctgtcctgtcgtgtgtggtgaattaccgcctcttgtctccctccggttacccgaagggagcgggctttctttcaccgatggcgattagccaccataaacatcaaaatcgaagtactttttcgctaatttctcgtaagtaccgtcagcgcgcatttcggcaaaggctttgttcagtgcttcgcgcagttcgttatcttctttacgcaggcccatgccggtccctacgccaaacagtttttcatctttaacagacgggccaccgaatttgtaatctttaccgacaggttgtttgaggaaaccttcgctggcagcgacctcatcctggaacgcggcatcaatacgtccggcagtcaggtcagaataaatgttgtcctgcccctgatagctgacgatttcaatgccttttggtgcccaatgttcattaccgaacgtctcctgggtggtgccctgcaatacgcctacccgtttgcctttcaggctctcgactgtcggctgaatgtcagaatttttcgccaccaccaaacgagaatcggcagcgtacagtttgtcggtgaaggctatttcttgctgacgtttttccgtaatggaaaggctactcatgatggcgtcaatcttcttcgcttttaaggacgggattaacgcatccagcggattttcgacaaacgtacattgcgtattgatgcgtttgcataattcctttgccagatcgatatcgaagccaaccagttcgccttgactatttttactttcaaatggcgcataggtcgggtcggtaccgatgcggatgttttgcggaatcgcagcaaacgccgcagttgcgctggagaaggccagaaccagagagaggcttagcaccagttttttcataatgtcctcaactgacagtctttttatagggaatatttacaggtttgttacacttatcgtgccataaaattgaccatcaaggcaaaatatcccgccccgttagacgtattatttttcattaaaaatgcttaagtatgcatttcaatgcaccacgatagtgcaacaaacctggcgtgcaccatgatgatcattccatcaggtacagcttcccagcgacgtatcagtcaccgtagacattaaagtcgaaatactttttcgccatcttgtcgtaggtgccgtcctgacgcagctcgccaagcgccttattgaaggcagccgtcagttcagcatcatctttacgtagccctacaccggtgccatcaccgaagtattttttgtcttttacactactgccagcaaaggcgaaatctttaccagcaggttgcttgaggaatccttcgctggcagcaacttcatcttgtaacgcagcatccagacgtcctgcagccagatcggaatagaccaaatcctggttggcataggccaccacatccacgcctttactacgccaggtctcgttagcgtaagcttcctgggtacttccctgcagcacaccaacatgtttacctttcagactatccagcgttggctgaatcggactacctttggccgcaatcaaacgagaatctgcggcgtacagcttgtcggagaaggcaatctcctgctgacgtttatcggtaatggaaaggctgctaataatagcgtcgatttttttcgctttcagactggggatcagcgcgtcaaagtcactggcaacccaggtacatttcacctgcatccgtttgcacatctcgttaccgagatcgatatcaaagccaacaaaatcacctttagcatctttgctactgaacggtgcgtaggtggtatcggttccgatacgtaccgtctccggtagcgccgcatagctggaagccgctgtggagagaccgactaacaaagacagagcgagaatgctcttcttcatacataaccctcaagtgaaaatggcttttttatgttgtgtattgtgttgtgtgtttgcaggctctttcatgcaggtcttatgccatcttgacgacaacagtaacattcaacgttaaatatgttaataagacgttgcattattgtcctgaagttgaagatagcaggtatagcggttgaatcgcagcgtttcgattgaatggcagaaacaaaatgtcgaggatttgatcgcggttgcaaaattgccctgaaacagggcaacagcggagttatgcgccctgccagcgggcaaagagatcttcaggaagggttatcgcaaactggtcaagaacacgattaaccgtctgatttatcacatcatcaagggattgcgggcgatgataaaacgccggaacgggaggcataatcaccgcaccgatttctgccgcctgagtcattaaacgcagatggcctaagtgcaatggtgtttcacgcacgcagagcaccaacgggcgacgctctttcagcaccacatctgccgcacgggtcagtaagccatcagtatagctatggacaatgccggaaagggttttgatactacagggtaaaatcaccatccccagcgtctggaaagaaccggaagagatgctggcggcaatatcgcgcgcatcgtgcgtgacatcggctaatgcctgcacttcgcgcagagaaaaatccgtttcgagggataaggtctggcgcgctgcctggctcatcaccagatgcgtttcgatatctgtgacatcgcgcagaacctgtaataagcgcacgccataaatcgcgccgctggcaccgctgatgcctacaatgagtcgtttcataaatagttgccctgtcagacttgcaggcagactttgcaggatttcggcgggagttgcaagtcagggtgccagaccggcaccctcagcgaaggcatcatccttcgttatgcatttcgagattttccacttcgttctgacgttgcactgctttggcgtcatcattacgtaacgtatcgaggaaatcgaggtagccctgatcaacatctttggtgacgtagacgccgttgaacacgctgcattcaaactgctggatatccggattttcagcgcgaacggcgtcgatcagatcgttcagatcctggaaaatcaacccgtcagcaccgatgatctggcgaatttcatcaacttcgcgaccgtgagcgatcagttccgtggcgctcggcatatcaataccataaacgttcgggaagcgaatttccggtgccgcagaagcgaggtacactttcttcgctccggcttcgcgtgccatctcgataatctgctcagaagtggtgccacggacgatggagtcgtcgaccagcaggacgtttttatcgcggaactcggcgcggttggcattcagtttacggcgcacggacttacgacgcagctgctggcccggcatgataaaggtgcggccaacatagcggtttttaacgaagccctggcggtacggtttgcccagaatacgagcaatttccagcgcgatatcacagctggtttctgggatcgggatcaccacgtcgatatccagatcttcccattcgcgggcaattttctcgcccagtttcgtgcccatattcacacgcgcgctgtaaacggaaattttgtcgataaagctgtccgggcgggcaaagtatacatactcaaacaggcacggattgctgaccggattgtcagcacattgacgggtaaacaactgcccttcttcagtgatgtaaatcgcttcgcccggcgcgacgtcacgcaggaaatcaaagcccagcgtatcgagcgctacgctttcggaagcgaccatatattctgtacggttctcgtcaatatcacgttttcccagtaccagcggacgaatcccgtttggatcgcggaaagcaaccataccgtggccgataatcatcgccacacaggcatacgcgccgcggattaagcggtttgtggcagcaatggcagcgaaaatattgtcggcttccagcgggtagtggcggaagttgtccagctcgctggcgaagatattaagcagaatttcgctgtcggaagtggtgttgatgtggcggcgtttttcttcaaacagttttttacgcaactcgtgagcgttggtcagattgccgttgtgggcaagcgtaatgccatacggggagttaacgtaaaacggctgcgcttcagaggcgctggagctgccagccgtggggtaacgcacatgaccaatgcccatattgccctgcaaacgctgcatatggcgagcttcaaatacatcgctcaccagcccgttcgctttacgcaaacggaagcagttattggcatctatggtgatgatgccggcggcatcctgaccgcgatgctgaagcaccgttaaggcatcataaatgctctggttaaccggcataacaccggcgataccgacaataccgcacatacgtctttttcctcgttaagccacatctcagagcacttacgctctgggcaagaaactactgctgctttgcagataatcaaaaaaacatctgatgataaaactgaattgcgggatcagctgacttttgctccagtcttcgcttttgctcaccccggtaaaggagtcgagaaagaagagaatggcagcaacaatcaacacaccgcgcaacgcaccgaaacagacgcccagcacccgatcggtgccactcaaccccgttttctccaccaactggcctatcacgaagttcacgatagcaccaacgatcagggtagcgataaacagtaccgcgatggcaatcccatttcgaaccagttcgtcttcaaagcccgtaaaccagacactcaggtaagtgtagtaatgactggcaacaaagaaagcacaaccccatgtcaccaggcttaacgcttcacgaacaaagccgcggatcaggctaaccagagaggaaaaagcaatcaccgcgattatggcgtaatcaatccagaccatatgtgtcccacgattttacgccctgtcatcctgttcggggcgcattctaacagaaaaagaaaacgtttgcgtagggatttccttcccgcgcatcaataaaaatggcgctgaaaaaatattcaacgccatcgactttttatgcctttgcggcatcgggcaatgcgtgtcggatgcggcgtaaacgccttatccgacctacggttctacccctgcgtaggcctgataagacgcgccagcgtcgcatcaggcaagaccgtattaattcggcgtatagcccattaccacgccacttaagccagaaagttgcttcaactcacccaggctacctttcagcttatctttgctggcatccggcccaaccagaatacgggtaattttaccctgcactggcgtggatgggctcgtataaacccgataaccggcaccgcgcagcttaccgacaatctcattcactttatcggcatttttcagcgcacccagttgcacaacataggctttacccgtcggtgcagctttttcttccacgaccggcttcggttctggcttcggcgcaggtggtgcttcaacctttggtttaggcggctccaccggtttcggcttcggtggggcgaccggtgcaggttccggttcaaactcggtgttattggctgcaatagtggccggatcgaggctcggtgctgcggcatcacctgcccgcacctcttccgctgcgccttccggcggctgcgtcggtaacgcctgggtggcggctggcatcatatcaggctcatcacgatcgcccgctttcggcaccagcgggatagccgcgaactcatcctgataatgttttttctgcccgtccagcagccctggaagtacaatcacccccagcgccaccagcacgatcgtgcccactaaccgattctgaaacttacttgccaccgcttctcctcgcgtcaatcacttccatgacatgtgcgaccgtgtggaaagaaccacacaccagcacggtgtcttccgctttagcgtccgccattgcggcatcccatgcctgcgcaacgctatcaaaacttttgccgttacccaaatgctcaagcagttgttctgccgtggcaccgcgcggcccttccagtggcgcacaataccagtcatcaaccacgcttttcaaccaggccagagttccggcaatatctttatcatgtagcataccgataaccgccagcacgcgcccgtttttcggtagcgctttcatacgcccggtgagatattccgccgcatgtggattatgcgcgacatcaaaaataacgcgtgggctctcgctcacaatctggaaacgtcccggcaaaattgcgctggcaatcccgtcgcgaatggcattttcactgacttccagcccgctggcacgcagtgccgccagcgctgttgcggcattcggttgcgggacaagcggcaacggcagattttccagcgtgccgtgagcatcgctaaacgcccagtcatgatcggtgacggaatagttccactcaacgccccgacgttgtaacagtgcacctttttcctgcgccacatcagcaatggtagaaggcatttccggctcaccgacaattgccggtttttcgctgcggaagatgcctgctttctcgcgaccaatactttcgcgatctggacccagccagtcggtatgatccagcgcaatactggttactaccgcgacatcggcgtcgacaatattggttgcgtccagacgaccgcccagccctacttccagaatcaccacgtcaagttgtgcctgcttgaacagccacaacgcgctcagcgtaccgtactcgaaataggtcagggaaatatcaccgcgtgcgctttcaatctccgcaaaagaggcggtgtgggcgctttccggcaattcctggccctgcacacgtacgcgctcggtataacgcaccagatgagggctactgtagacgcccactttgtaccctgccgccatcagaatgctctccagcgtacggcaggtggtgcctttgccattcgtacccgcaacggtaaacacaaatggcgctggtttcaggacgccaagacgcgccgcgaccaggctcacgcgctcaaggccgagatcgatagttttactgtgcaggttttccagataagaaagccagctagccagagggctcgcggcttgaggagtgcgtttgataatcatggtatccgctgattcgttacggtgagaatagcaaaagggcagagccagtggccctgcccttatcagttatcaggcctcaggttcctgatccggtaccgggggtaccactacgccttcacgcggcgcttcaggattcggcgctggcagattcatcaacttcgccagaatgctcgccagtttcaggcgcatttccggacgacggacgatcatgtcgatcgcgcctttctcgatcaggaattcactgcgctggaatccaggcggcagtttttcgcgaacggtctgttcgataacacgcggaccggcaaagccgattaacgctttcggttcagcgatgttgagatcgcccagcatggcgaaacttgcagaaacaccgcccatcgtcgggtcggtcagcacggagatgtacggcaagccgcgctcctgcatttttgccagtgccgcagaggttttcgccatctgcatcaggctcatcagtgcttcctgcatacgtgcgccaccagaggcggagaagcagatcagcgggcagttatcttccagcgcctgctcaacggcacgcacgaaacgtgcacccacaacagaccccatactaccgcccataaaggcgaactcgaatgccgcagcgacaaccggcattccatacagagtgcctttcatcaccaccagcgcatctttttcgccggtttctttctgcgcagatgccagacggtctttatacttcttggagtcacgaaacttcagcacatctttcggctcaagctcgctacccagctccacaaggcttccttcatctaacaggctatgcaggcgattacgcgctgtcatacgcatgtgatggtcacacttcggacagacctcaagattacgttccagctcagcgcggtataaaacctgaccgcagctatcacacttagtccacaccccttcaggaatgctcgccttgcgggtgggagtaatgttgcttttaattcgttcaatccagctcattagggacctttctgtctgaacctggttcgatgccagttttatctttggggacgcataatgccatttttgcccccaacagaccatgaatgttgcacattaaaacataacagcccgaaactttggataaaaaagtggtcgaaccgcggagttactttttattttgcggcgcgtgccgcagcgcgtttgtgacggattatttcgatgacgcccggcaaaatagaaaccacaataatcccgacgatcagcagcttaaggttatcctgaaccatcgggattgtaccgaagaaatagcctgcgtaggtaaaaagcagtacccacaacagtgcgccgatcacgttataagcggcgaaatgacggtagctcatgtggcccattcccgcaacaaacggggcgaacgttctgacgatcggcacaaaacgggcgagaataatcgttttgccgccatgtttctcataaaactgatgggttttgtcgagataactgcgacggaaaattttgctattgggattactgaacaacttttcaccgaacaaccgcccgatagtgtaattgaccgcgtcacccacaatcgcggcgatcagcatcagcaccaccatcatatggacgttgagatcgttggtttccagacttgccaacgctccggcaacaaacagcaaactatcacccggtaaaaacggcgttaccaccagaccggtttcacagaacaaaattaagaacaaaatggcataaacccagacgccgtactccgcgaccagctctgccagatgcacgtcaatgtgcaggataaaatcgatgaggaaataaatcaggtccatatttgcctatgccttgtactcgtcatctttcaggctgtaactacgttggctacagcctgaaatgttccgagcattattctcgttagtccgccagaaatagcgggcccattggcggttttggaagatcataccggtcagggtaatccaccgcgaccagatacagcccttccgcttttgccgttgctgccgccagcgttctgtcctttgccgccagcaactctgctatccagctctccggctggttgtgggcaccgacttccatcaggctgccgacaatattcctgaccatatgatgtacaaaagcattcgctttaatatctaccaccacataaggaccgtgacgcgtgacattaatatgcataacgttgcgccacggggttcgggactggcactgcaccgcacggaagctggtgaaatcattctcgcccagcaagcattgcgcagcccgatgcatccgttcagcgtccagcggttcgtaaaaatgggttacccctttactcagtaccgccgggcgcagccgatgattgtagatgatgtagcgataacggcgagccgtggcgctaaatcgggcatgaaaatcatcaggtacagttttaacccaacgcacagcgatgtcaccaggtaaattcgcatttacgcccaaggtccacgccgcgtctttgcgcagcgcggttgtttcgaaatgcacaacctgcccggtaccgtgtacccctgcgtcagtacgcccggcgcagaagacggtgatgggttcgttcgccacctgggagagcgccttttccagcttctcctgcacactgcggacttcgttctgccgttgccagccgtaatacttactgccgtcgtactcaatgcccagcgcaattttataaactggcggttgttgctggtcggacattagtacagatactcctgcaccagtttctcggcgatttttactgccatcagcgcgccgccaaagcgaacgttatcggccacgctccagaactggacttgctccggcataccgtagtcattacgcacgcagccaacagaaagatgcggcgtaccgctagcatcacctacctgagttgggaattcgttctcttcagagagcacaatatcttcgccttgaacaaacgcatcacgcgcttcttctgctgccagtggacgcagagcttcaaagttgaccatctgggcatgaccgtagaataccggtgcctggacgacgctagcgctaatcatcagcccttcgtcctgcaggattttgcgtacttcgtcaacgatacgacgttcttcacgcacgctaccttcgctatccggcagtaacggcagcatgttgaacgccagctgacgcccgaagaaatcttcttcgtcaatcggaatgccgttgagcaatttcgcactctgccccgctaacgcatcgaccgcttttttgccctgggcggaggcactaatcaggctggtaacgctgatacgacttaaaccgccctgatcgattaacggtttcagtgccgccagcagctggctggtcagactgtctggtacggcgatgacattccggttccggtaatctgtcagtacaaacgggtttacttccggcaccaccagcggtacgtcgggttcgagagcaaacaatccactgctgtcgatcaccaggcaaccactgttggtcgcttcttcaacccaggcagcggtagcttctttgcctgcgacaaaaaatgccagctgcgcctgcgtccagtcgaattcagcggcatcctgcacggtgattgtcttaccaccaaagcgcagttgttcgcctgcgctttcgttacgtgccagtgcataaatttccccaaccgggaactgacgttcagccagcgtttcaagcagggcttcgcccacagcgccagttgcgcccaggacggcaatgttccagccttcagacatggtggtttactccagaaatagcaaagctccctgccaatgttacagcagagagcatgaagaagagattaacgtgccggatgatgaacggcgttaaaacccagtttacacagcaaacttgccgcactggcgtcatcacaaattacatacagagaactccattcacggcgctcaagatagtttttgcgcagtttatcgaactcacccggtatcccggcgactttacgcagcggtgcgtcatcgcggcgcacatcatacaccaaatgcaccagccttttcagcgtcggttgatcgagcgggccatgcagcgtaatgcgaccaaactctggcgcaggcagtaatgtatccagcgcaacgtgctgttcatgcccaataaacttgctataagcttcaaacacttgcgtagtaccgcgtgctttaccttccagggtatagcctgcgatatggctcgtgccgatatccacttttttcagcagctcgacgttgagttccggttcgccttcccagacatccagcactacgcttaacttctggccttcattcaggcaggtcagcaacgcagtattatcgacgactgcgccacggcaggcgttaatcagaatcgctccgggcttcaggctacggatcagtttttcatccgccagatgtagcgttttgtacggaccatctttaaagagtggcgtatggaaagtcagaatatccgcgcgctggactaactcatccaggctgcggaaatcaccctcatccccacggtcggcgcgaggcggatcgcaaagtaaggttttaatccctaacgcttccagtcgcgcctgcaatcgacgtccaacgttaccaacgcccacgatccccaccgtacggtcgtacagactaaatccatcgcgttcggcaagcatcagcagggaggagaaaacatattccaccaccgcaatcgcattacagccaggtgcagcggaaaaaccaattcccgcctgcttcaaccatgcttcatcgacatggtcggtccccgcagtggcagtgccaacaaatttaatgggttttcctgccagcaaagattcattcactttcgtgacgctacgcaccatcagcgcatccgcgtctgccagttgagcgacggggattggacgcccgggaaccgcggtcacctcacccaaacggctaaataagtcgcgggcataaggcatattttcatcaacaaggattttcacgtttgtgttacctgtatgagacgagagttaaccggacaagtgtgccataatctcgcggccaggcatacttgcgaagatttcaggtataaggatacgtaatgatacaacctatttccggccctcctcctgggcaaccaccaggtcagggagataatctgccgtctggcacgggcaatcagcctttatccagtcagcaacgtactagcctggaaagcttaatgacgaaagtgaccagtctgacgcaacagcaaagagcagaactgtgggcgggtatcaggcacgatattggtctgagcggagatagtccgctgcttagccgtcacttccctgccgctgagcataatctggcgcaacgtctgctggccgcgcaaaaaagccattctgcccgccagcttttagcgcaattaggggagtatttacgtctggggaataatcgtcaggcggtcacggattatatccgtcataactttggtcagacgccgctgaatcagctcagtccggagcaattaaaaaccattctcaccctgttgcaggaagggaagatggttattccgcaaccacagcagcgcgaggcgaccgaccgtcctttattaccggcggagcacaatgcgctaaaacagctggtgaccaaacttgcggcggcaacgggggaacccagcaaacagatctggcaaagcatgctggaactttccggggtgaaagatggcgagttaattccagcgaaactgtttaaccatctggtgacctggctacaggcgcgtcagacgctaagccagcaaaatacgccgacgctggaaagtctacagatgacgctaaaacaacctttagatgccagtgaactggcggcgttaagcgcatatatccagcaaaaatatggtctttctgcgcaaagtagcctttcttctgcccaggccgaggatattcttaatcagctttatcaacggcgggttaaagggattgatccgcgtgttatgcaaccgctgcttaatccttttccaccgatgatggacacgttgcaaaatatggcaacgcgtcccgcgctgtggatactgttagtcgcgattatcctgatgctggtctggctggttcgttaaccccgacgaaaactcagtatcgtgacaataatacccagcaccgcagagatcgccccggcaagaaatacgctagagtaaccaaacgtggtcgccagcattcccgccagcggcccggagacgccgagggcgatatcctgaaacgcggcgtaaccgcccagtgcggtgccgcgaacttgactggggacgcgtttaaccacctccacgcccagcgcaggaaagataaggctacatccggctccggttaacgccgcgcccgctaatgcgacccatgcacctggggcttgccagagcagcaacaagcccaccgtttctacaagcagagagacaatcgccactttcacgccgccaaaacggtccggcatccagccaaacatgacgcgcatcacgacaaatgcgccgccaaacgcggtaagagtaaagcccgccatcgcccatcctttgctggcaaagtagaggctaacgaaagtcccgataacagcaaaaccaacgccttgtagtgccagacctaaccctggtttccagataagcccgacaacgctccacaggcttggacgttctcccgccagggccggtactttgcgcactgtgccgttacaggcccacgccagtacgggtaataccattgtggtgatcgccagtgcggcaaaaccgtaatggctatgaatcaacaggccaagcggagcaccaacagcgagggcaccgtaaatcgccattccgttccaactcatcactttgccagagtgttttggccctacgatgcctagtccccaggtcagagcgcctgtcagtaactggctttcaccaaagccaagaatcaaacgcccgacgaccaacagagcaaatttgaacggtgcggagacaggcaaaatcgccgccagcagcaacgcgccgccagccagaccacaagctaacattccctgaagcgcgctacgttttgcaccatattgatcggccagtcgcccggcgtaaccacgcgtcagcaccgtagccagaaactgaatcccgacggcaatgccgaccatggtattgccatagcccagttcatgatgaacaaacagcgggataaccggcaacggcaaccctacggtcatgtaggtgagaaaaaccgcaaaagcgatgcggaagaggctaaaattggcagaagatcgtgtttcggtttggcttacagcagtcatgcattactccagaatgcagcgcaaggcgaggagtatccccgtctcatctctctggtttcagggttacggtgcgttggcaggatttaacgcgtacgtcttttcagaaggaaatcgacaaagcgggaagtttgcctggaactggcggcgattgtcaatgatgtgaaaaagggaaccatcaggttcccttttgcgttagtgccggaggccgcattggcgcgtaacgtcggatgcgacgctggcgcgtctactccgacctactgcgaattaatctttcagcttgcgcattaccagcgtggcgttggtgccgccgaagccgaagctgttagacataacggtggtcagttcgcgatcggtcgtttcggtcacgatgttcagacccgcagcctgctcgtccagctcttcaatgttgatgctcggggcgataaagccgtgttccagcatcagcagagagtagatagcttcctgtacgccagcagcgcccagagagtgaccggtcatggctttggttgcagaaatcgccgggctcttatcgccgaacacttcacggatagctgccagctctttcacgtcgccaaccggagtgctagtaccgtgggagttcaggtaatcgattggggtatcaacgccatgcatcgccatcttcatgcagcgtactgcgccttcgccagacggagcaaccatgtctgcaccatcagaggttgcgccgtagccaacgatttcagcatagatgtgagcaccacgcgccagcgcgtgttccagctcttcaaccactaccataccgccgccgccagcgataacgaaaccgtcacggtgagcgtcgtaagtacgggaggctttttccggggtgtcgttgtatttagtagacagcgcacccattgcgtcgaattcgcaagccatttcccagcacagctcttcgccgccgccagcaaacacgatgtcctgtttgcccagttggatctgctctactgcgttaccgatacagtgtgcggaagtcgcacacgcggagctgatggagtagttaacgccatgaattttaaacggggtggcgaggcaggcagaaacgccggatgccatcgctttggtgaccacatacgggccaaccgctttcaggccgcgcgggccgcgcattgcgtcagcgccgaacacctggaaacgcggggagccgccgccggaacctgcaatcaggccaacgcgcgggttattctggtaagcttccggagagaggcccgcatcagcgattgcctgctccatagaaaggaatgcataaatggatgcgtcgctcataaagcgcacaactttgcggtcaatgaggccagtggtatccagttttacgttgccccagacgtggctacgcatgccggaatccttcagctcctgagagaaagtgatcccactacgtccttcacgcagagatgccaggacttcctgctggttattaccgatgctggaaacaatgcccaggccagtaatcactgcacgtttcattcaatacctctgtaagtcgcacatagagtaagtttcgaatgcacaatagcgtacacttgtacgccgaacaagtccgatcagccatttaatagagaaatttgcgcagccttacacacatcgctaagatcgagccaccgcctgtaagacgagtaacttacgtgaaacactactccatacaacctgccaacctcgaatttaatgctgagggtacacctgtttcccgagattttgacgatgtctatttttccaacgataacgggctggaagagacgcgttatgtttttctgggaggcaaccaattagaggtacgctttcctgagcatccacatcctctgtttgtggtagcagagagcggcttcggcaccggattaaacttcctgacgctatggcaggcatttgatcagtttcgcgaagcgcatccgcaagcgcaattacaacgcttacatttcattagttttgagaaatttcccctcacccgtgcggatttagccttagcgcatcaacactggccggaactggctccgtgggcagaacaacttcaggcgcagtggccaatgcccttgcccggttgccatcgtttattgctcgatgaaggccgcgtgacgctggatttatggtttggcgatattaacgaactgaccagccaactggacgatagcctaaatcaaaaagtagatgcctggtttctggacggctttgcgccagcgaaaaacccggatatgtggacgcaaaatctgtttaacgccatggcaaggttggcgcgtccgggcggcacgctggcgacatttacgtctgccggttttgtccgccgcggtttgcaggacgccggattcacgatgcaaaaacgtaagggctttgggcgcaaacgggaaatgctttgcggggtgatggaacagacattaccgctcccctgctccgcgccgtggtttaaccgcacgggcagcagcaaacgggaagcggcgattatcggcggtggtattgccagcgcgttgttgagcctggcgctattacggcgcggctggcaggtaacgctttattgcgcggatgaggcccccgcactgggtgcttccggcaatcgccagggggcgctgtatccgttattaagcaaacacgatgaggcgctaaaccgctttttctctaatgcgtttacttttgctcgtcggttttacgaccaattacccgttaaatttgatcatgactggtgcggcgtcacgcagttaggctgggatgagaaaagccagcataaaatcgcacagatgttgagtatggatttacccgcagaactggctgtagccgttgaggcaaatgcggttgaacaaattacgggcgttgcgacaaattgcagcggcattacttatccgcaaggtggttggctgtgcccagcagaactgacccgtaatgtgctggaactggcgcaacagcagggtttgcagatttattatcaatatcagttacagaatttatcccgtaaggatgactgttggttgttgaattttgcaggagatcagcaagcaacacacagcgtagtggtactggcgaacgggcatcaaatcagccgattcagccaaacgagcactctcccggtgtatagcgttgccgggcaggtcagccatattccgacaacgccggaattggcagagctgaagcaggtgctgtgctatgacggttatctcacgccacaaaatccggcgaatcaacatcattgtattggtgccagttatcatcgcggcagcgaagatacggcgtacagtgaggacgatcagcagcagaatcgccagcggttgattgattgtttcccgcaggcacagtgggcaaaagaggttgatgtcagtgataaagaggcgcgctgcggtgtgcgttgtgccacccgcgatcatctgccaatggtaggcaatgttcccgattatgaggcaacactcgtggaatatgcgagcttggcggagcagaaagatgaggcggtaagcgcgccggtttttgacgatctctttatgtttgcggctttaggttctcgcggtttgtgttctgccccgctgtgtgccgagattctggcggcgcagatgagcgacgaaccgattccgatggatgccagtacgctggcggcgttaaacccgaatcggttatgggtgcggaaattgttgaagggtaaagcggttaaggcggggtaatctgctctcgcagtgtttgccggatgcggcgtgaacgccttatccgacctacgtgtgacgtgtaggcctgataagacgcgataagcgtcgcatcaggcatgctgctccagacgccgcaacttactgctgactcgcctgctgaaacaggttttcccacatatcggtcaccagcgcctggtcacgcgggctcaattcaccagcaccaatggctttttccagactctggctaacggtcgtatgcaccgcctgagcggagtggtcatcaccactttccagttctgcgatggctaatgtcaggtggccacgcaaatacccactggcaaacaactcatcatcactggcatggtcaaccataccgtcgattaatgccagaatgcgactttcaaactccgcgatcatcttctttcctcattgtaaaacgtggcgctggcttcagttgagcgcttccggccacgggaactgttccgccgtaagttccggcgtgtgataataattttgtagtgctttaatgaagcgtgccggacgttccggaatgccatttgtcagataatccatcacctgcgcatgtactcgccgttgaaacaccacacgatccggttcgaaatccccttccagattgtcgcaactgacgttaaacggatatcccgccgccacacagaacaaccagtcgagcgcctgcggcttcacttcaacatcttcaaactggctttgcgtttgggcatcgcgtccgtccgggcaataccagtagccgaaatcaaccagctcacggcgcgctttcccggcaatacaccagtggctaatctcatgaattgcgctggcataaaagccatgagcaaagacgattcggttatacggtacttccgcatcagcaggaagatagatcggttcgtcgtcgcctttaatcagacgggtattaaaatcatcggcaaagcagctattaaaaatttcaatcaactgctcgtagtggtgtgtactgttcattagttcatccccaaccagtggaggatctcctgtccgtggctgtcgtaaagtaatttggcactcatcaccgcgctgacgataacaatcatcgggcggatcagcttttgtcctttgctcaacaccagtcgactacccatgcgcgcgccgaggaactgccccaccagcatgacaaagcccgtcgcccaaatcactttgccgccgagaataaacagcagtaaaccgccgatgttactcgttgcgttgagtaatttggcgtgagccgtggctttggcgaggttaaatccgcacagcgtaacgaaggccagcgcgtaaaagctcccggcagccgggccaaagaatccatcataaaaaccgacgcagccaccggctattaacgcgaagggtaaaccgtacatccggcgctggcggtcttcttcacctagctttggcatcagcaagaaatagaggccgatacaaattaccagaatgggcaaaatctgccgtaagacatcagcctgaacgtattgcaccagcagtgcgccgctcatactgccgacaaaggtcatggcgatattgagtttctgatcgcttaaactaaccactttgcggcgaataaagtagatagtagcggaaatagagccgccgcaggcttgcagtttattggttgccagcgcattagcgggagacatccccgctgccatcaatgccggaatggtgagtaacccaccgccaccggcaatgctgtcgataaatcccgccagcatggcgacaaaaaagagaactcccagcaacagcggggaaaccataaacaggctattaaacgtttccattagatcacgtgctcatccagtagcgcctggcaggaaggcggcaacggaggcggtgtcttcttctcaggctttgttgttcccggttttggaggttcaaaccagctttgcagttctgccccgcaaccatcgccacttggcggtaaaggttgatcttcacactccagactatcggcagggcaacgtaatcgtacatgcatatgcgcgcgatgctggaaccagggtcgcactttgcgcaaccagtcgcgatcggtgcccgcatcaaggcaaagttgttgtttaatcgccggattaacaaaaatgcgcgtgacgtctttgtcctgggcggcgagtttgatcaagctgaaaatttctggcttccacagcgtggagacaacgtgtttaccgtcgcgggaaactaagtccagtgcttgcgggcgcaagagctgcgcggaggtccagcgagttttcggcagttgcagaaagatatcgacatccagtccggtctggtggctggcatgaccgccgttgaaacgcccaccagcgggcatccccatatcgccaatcagcaccgtacccatgcccagattgctcacctggctactcagacgctggataaacatcaccagatccgggtgaccgaaatagcgacgctgatcggtacgcatgacctgataatgttcggactgtatcggcagcgtgtcagcgccgacaatacagccattagaaaaactgcctatgctttgtgcgctacccggcacaggttgggttattttttgccacggcgtcgctgccaggctggcgctactggcaagcagagccagcagcgcaatcgcggttttattcattttttaccagcgtggaatatcagtcttcacatcggcattttgcgcccgttgccgtaacaggtgatccattaaaacgatcgccagcatcgcttctgcgatcggcactgcgcggatcccgacacagggatcgtgacggcctttggtgatcatctcaacttcttcgccaaagcggttaatggtacgacccggcacggtaatgctggaggtcggtttcagcgccatatgggcaatgatttgctgcccgctgctgataccgccgagaatgccgcccgcatggttgctctggaaaccgtctttggtgatttcatcgcggttctggctgccgcgcagcgccaccacgtcaaagccgtcgccaatttccacgcctttcaccgcgttgatgctcatcagcgcatgggcgatgtcagcatccaggcggtcaaagaccggctcgccaagtccggcaggaacgccactggcaacaacggtgactttagcgccgatggagtcgccctcttttttcagcgcacgcatcaactcgtctaacgcgtcgattttgtcggggtccgggcaaaaaaacggattttgctcgacctggctccagtctttgatatccagcggaatgtcgcccatctgggtcaggcagccacggatttcaataccaaatttctcggcgagatattttttggcaatagctcctgccgccacgcgcatggcggtttcgcgggcggaagaacgtccaccgccgcgataatcgcgcagaccgtatttttgttcgtaggtgtaatcggcatggcctggacggaaaacgtccttaatcgcactgtaatcctgagagcgctggtcagtgttttcgatcaacaagccaatgctggtgccggtagtaacgccttcaaaaacaccggagagaattttgacctgatccggctcgcggcgctgggtggtatagcggcttgtcccagggcgacgacggtcgaggtcatgttgcaggtccgcttccgtcagcggaatgcctggcggaacaccatcgacgatgcagccgagcgccagcccgtggctttcgccgaaggtggttacgcgaaagagttgtccaattgtgtttccagccatcacggctccgttattgttgtgtttgcgtgtttacttaatctttataaatcgcgaaatgttctcgtgcggcaataagctgctctttggtgagcataaacacaccatcgccgccgttatcaaactccagccaggtgaacggaacatccggatattgttccataagatgtaccatgctgttgccgacttcacaaatcaacacgccatcatcagcaaggtaatctgccgcgttaccgagaatgcgacgcgtcagtttcaggccgtcagtgccagatgccaggcccagttccggctcgtggcggtattcgtttggcaggtcggacatatcttccgcatcgacatacggcgggttagtgacaatcaggtcgtactgcactttcggcaagtcgcggaacagatcggaacgaatcggaatgacgttgtggatcagaccgtgttcttcgatgttctgttcagcaaccgccagcgcgtctggagagatatccaccgcgtcgacttctgcatccgggaaggcataagcacaggcaatggcgatgcagccgctaccagtacacatatctaaaatatgctgcggttgcttgctgataagtccggcaaatttattgttgatcagttcaccaatcgggctgcgcggcaccagcacgcgttcatcgacgtaaaattcatggccgcagaaccacgctttgttggtcaggtaagccaccggaatgcgttcattgacgcggcggatcacgcgttcaacaatacggtgtttttcgctggaggtcagacgcgcggtgcgcatatcttccggaatatccagcggcaggtagaggctaggcaacaccagctgtacggcttcatcccacgggttatcggtaccgtgaccgtaccagatatttgccgcgctgaagcggctcacgctccagcgcaacatgtcctgaatggtttgcagctcatttactgcttcatcaacgaaaattttatccacgtattcctccagggcatgatcgcaataatttcggcggctagtttgccatgaagatgacgataaatcagcattcacgcgcggtgagtgaggaaaaatacgtttaaaacgatcgattgcgctacgagtcgggtaaactgtaggaaaattagaaatagagacagataaatgaaaaagaaaacaacacttagcgaggaggaccaggctctgtttcgccagttgatggcggggactcgcaagattaagcaggacacgattgtccaccgaccgcagcgtaaaaaaatcagcgaagtgccggtgaaacgcttgatccaggagcaggctgatgccagccattatttctccgatgagtttcagccgttattaaataccgaaggtccggtgaaatatgttcgcccggatgtcagccattttgaggcgaagaaactgcgccgtggcgattatagcccggagttgtttttggatttacacggtctgacgcagctgcaggccaagcaggaactgggggcgttgattgccgcctgccgccgtgaacatgtgttttgcgcctgcgtgatgcatgggcacgggaagcatattttgaagcaacaaacaccgctgtggctggcacaacatccgcatgtgatggcctttcatcaggcaccaaaagagtatggcggtgatgcggcgttgttggtgttgattgaagtcgaagagtggctgccgccggagttgccctgaggagttgagcgcgttgcgccaggtacgggtaatggcaggggcgaatgcccctgcctggtgtatctaagggttacaactcattcagtatgtactggaaccggcaagtagaatcgattggctgcatactgctggtatcaacacgcacgaccatatcgtgtaactgtttgtccgttatagggtgtcgatttggcgtgacgctgacttccgccttgtcacatccgctcgcggtaaaagttatcatctgtgcaacccagcggcagtaaccacctgtttcattcatctgcgtactgtcgcacaacttcccatctttcatcaaatacgtactaagcgttttctcaaccacaccgcccgtgctctgcagggtgagcagtttactcttactgacataattctcattccaactaacgtcataaggttgaacagaaacggatggacaaatcgtgtcgtgactatcaggcccctgatacgtcacgccccctggagaggcttcagagtcattcataataaccaaccatggacaagaaaagtaagattcaatctctgcagagacaataacctcaaatgtataatacccgcagttccacccagacggtaatccaggacaacttgctttgttgatattttgatggtagccaatcagcttaacgctaggggcaggaggaggaccactccagctcacattttgcaatatttccccagtcatgagccattgactacttttatattcaccaacgtacactgcggatggcatcattatttttaaattaaaagtcgcaatattacggctatcaccgttgtaaccgtagtaaacgtcaacgctatgcccggcagccatagcttctgtagtagcaataagcatgaccagagcgaacaaccatcgtagtattttcattttaaatatactcaaatgtcgcagttaaagaggcggtaaattcaccgatcgtcacatcacggccgcttttcgcctgtagccaggctctgaaattgatatcgttattgccattggttagcgcaaaggtcgccccatttgtattgttgatggcaacctgcattccgtcggttttttccatgccaattcccactccctgagcggtactactcgtatccagtgccagaaaaccgggttgttcgctgtcttctacccccgtgagcgtgacttttacgttgtatcccgccggccctttgcaatctttcagcttaaagactacgggtacacgagcggactggcctgcaacgttcaaatcctgacgactgaccgtgggaaagcgcacctctgccagatattggccatccaccaccagcgcacaggatttacttaataaattaccggagaaatgcagattattatctgccgcgaataacgtgctactcattgccaatatcagccccgctaacaggacgtaaccaccggactgaatcatacttttattcattgataatccacccgtaatgttgcgtaagcgctaaaattcgtatcgcttaacacagcatcactcgcttttaccggtacggcctccagcttcggcttttgcgtaaaatcagtggcgttgatagcaagcggagtattgagtttaaaacgctgaccatcgtgctgaagctcgataccaaaaccgggtacatcagtttcaattgctgcatcattaaaactggtttgtgtaccagtccaggtgagggtcatctcccaatctggatgacgggtcgtgctgtcacaagtgagttcatatggcacctctttacgaccatagttgccgttgatgtcgtcgataatgagatcgcgaaattcgacttcaatggttttaccaccgctgatgctacaggttggcggactcaataatgtcccgtgaaaggtgatgtcttcatcagcagcatgagctatggcgctactgacacaaagcagggttaagaaagtctttctcattgatagtccaccaccatggtcaaactggcgttaaactcgcccgcagcaagttgcgccccgcttgccttcacaggtacagccttcaactgtggctggttattgatattaaatggcgtccagctattttcaccgacggcaaacaaactgttatcggcgctattttctatccgaatgcccagcccggtgatattggtactgagtaccgtttcgccgttaatcgtactggtattgcccttaagttgcatccgcaagtcgttagcaagactgtttgtgcagttcaacgtgtatttcgcatcttgccgataattggtgccatcaacgttatcagcaatcatattgccgaactctacctggctgcccttgatactacagggtggcggagcatcgaccaacacgcgcagaattaaatccacgggtttactaccagccatagcagataaactacagacactgcataccagcagccctgcgcccactacaaacttttgactcataactccccccgtcatcagcctttgcggctctgctcttcatccacctggcagctgttgccattgcactggaagaacagcggcatccgtgcgccaaagtcgttgacgtaagtcagcaccggtacgctatccattttcacattcagcggtaccgtggttttcggctcaatgaccagagggctgaaccctgcagctggattaccgtttttctgcgcactggcgttgctgataatcacgtagtacggcgttgggttattgacggtaaatgcctgaccgctgcgggtgagcgtcaccttgtgctgccacggacttttcatactgaccttttccagcgcctttggtcgccagaacaacttgatacgcgtttgcagcgcgatttgcagggtattgggtttgttactttttggcgggatctcgcgcacgttaaagtagaacatgctttcacgatcggctggcaatttgttgatatccggcattccctgcacttttacctgcccgttcatcatactatcgatgcgttgcactggcggcagcacagttaacgggctggtgatcttgttacccttttcatcttcaatccagctttgagccagataagggagtttcggatcgttattacgcagcgtcacgctgatacttttgtcgctttcattaaatatcaaacgggtacgatctggcgttacagacgccagggcagacaaactggtagcgctaagcagtaacgccagcgtcatagcacccaatttggcagagcaaagtaaatcagacatggatcattccttaatcacgttattggttagcactaacagaaacagggggatcggtgggtgtcacctgttgcgtctgctcctgaatgacaggctttatgtcatcaggaacaaccggcgcgacgttgcctttatgctggcatggcagtaacaagccgttaaacagatcggcaggcagcgggtccggcaggttgatatcgcaatgcgcaacaccactccagaacacactcatatgttcgccaggtttcaccccagccagatagacactaccgtcatcatcgacaaggcccactgtctgctcgttatcattttttacttctgcgccaaacggtggatggctgccatcttgtaaacgcagcaccgccatcgctttttgaccactgatgacggcaaatttgcggtagccaatggctccttcagttagcgtggcttgcaccacgctctgggttgcttcggcgttttccggcaatttgttgaggtcgatatacgcctgattgcgataataattgttaacgtcagaaacgacggctttaccaaacatattggtataaacagcagccccgttaccttccaccggaacatcggcaacgccatcggcatcaatcagcaggcgtgtcccgcccatattctgggtacggtgaagtgcgccgccgtgggtagtaagcgttgcgccgccctgtaagctcaagcccgcagaggtgtattgcccttcatggtagttcgcactgaggtcaacctgcgccaggctaccatcatggctgtagtagccatcaacgctggtgtgtttgtcactggtgccgatgttcaactgatagtgagtcgcgtcatcgacacggctaaaataaccgacctggctgctgtccgtcccactgccatagttgccgttatagctaacggtactgttgtcgccccacggcatactgagcgaaatttacatgcccttatccgcccggttgtcatactcgtagcggtagccagtcagggaaacgctcatattacgaatgctgcccatattgaaatagtgggagagcatgatgttgtagtttgtctgctcctcacgatcccagtaggtatggcgggtatagttgagataaacgctaacacccgcatcgcggaagttctggttataagtggcggtgtacatctctttgtcgttgcccgtacggaccatttcgctgtcactggcatccagatactcgctcatggtcataaagttctcttcgctgaagcgatatccagcgaaagtgacgcggctgttgagctggtcaaagtctttggaataactcacacggaaggagttaccgtccaggctacctttgccataagcggtgtctttatccagtttggtatggctatgagtaacatcaaacgcgaccgcgccgaaggtagacaaatcgcgaccgacgcccagcgccgcagactgatagttttcatcacccagcgcaccgccatataagctccagccgttagcgatgccccaggaggcttcagcaccagagaaaaatcccccctcgacatggtggccccactcttgcggacgtcccatcatgatcttatagcgaacctggcctgggcgagtgaggtatggcatgctggcggtgctgatgtcatattcctgcacctggccgttctgttcttcaatgcgaatatgcaacgtaccggagacggaatcaccaagatcctgaatacgaaacggtccagccggaacctgcgtttcgtaaatcacacgccccatctggctgacggtcacttttgctgtggtgtgtgccacgccggaaatgtctggcgcgtagccgcgcagattgggaggcaacatttgatcgtcagtgctgacactgccaccaacataattaaaaccgtcgaaaatatcggaattgaggtaatcttcgcccagcgccagtttggcttttaaactcggtaacgcccgccaggcataatagcgactccactcccattttttttgtgtgtcatcgccgccaaattcatcgtcatcatcattactgcgcgtatgttgatagttggtctgccagtcagcgcgcatacgccatggccccaggttaaccccgaccgtcccgttgccgctgatctcgttactgtcatcgccgccattttcttcgtgtcgtgtttgcgcagtgatgctgtagtccgcaatgatcccggagatgccatcatcccaacgagaaggtggatcccagtcgggccaggtatattcgaggtaagcctgcggtagactaatgactaatgcggactggcttaaatcagccttaatttccacgccttccagttgaccgggcttcaggcatttaccatcgtggctccattgcagatttttcgccacgtcttcttttaaaccaaactgcgccaccagttccggtgtcagacaagcatagcttttgctaacgtcatcttcaccagcataccagtaaatatcgtactcttccgccaatggctgtttatttagttgaacctgtaaattgtattttccgggctcaacatacccctggctggaaaaacgcttcagatcaatttttgtgtcgccttttaattccagaaaacgggaatcaaactgaatgtcgtcttcagcccagacactgctataactcccactcattgccagcgcaatgcaccacggaagaatccgtaatcgaaaaagagaatggtcaggcatacacgtttttatccgtttttattcttgttcggtcaaaatccatttaaataccccatagcagtgtcgctatgggggtatgccttacaggtaagtaatctggaaggtggtatttgcttcgaaattacccagatctggcgcatcagctgcgccgaccagccaggctttaaagttcagagtctgcttcgctttgcctttattagtggcagtatctttcacgattttctggtcaatacccatgccgcttttgtaagaggtacccagagagtcaccgatcgccaggctaacattgttaaatgccgcaccggtatcggtattgaaaatggtgtaataattgccgctatttgcagaagaaacggtaccagtaaaggtagtggtcattgtttcctgagtatcaaatacgcaatcttgcaggcgaatctggaaatttttcggcgtggtggtgccgttatttttcagtttttcggcaccgatatcacccatatcaacttccagtttgtgatcgtccggaacgatagaacacacactgtcttcaatggtgccgtaaaaacgtgcagtaccgttgttacccgcagcgattgttgccgtagaggtgaacgcgcccatcaccattgccgcagcaatagctgttttaacaaacttactcattatttgtccttaaactataaataattaaaatataaacattgcaatacattgattcagtcaatagccaatgtttatacccagccattgaatacggcatgcgatccaaaaaaacaggtcgtaaaaaatgtattcgttggtgtggggtcgaatagtgatgttttcactcccctgattcaatttaattttactaatgagtaaatgtagatttaattaatatattgataggggaaagattatcttaaggatcttctaaaaaaacacgaaatatatatttagaaaaaacaggaagcatatcaacaatgaatgccaatagcttaaaaaacaaacaatgaacatataatgcgattggcattaacccgcttttgtcgatataatatataaacactatagccagaatttaatcaagtttcaattacgtcctgcctgattattcaactctattttctccattatctgtattaataaatgataatgagtgtcaaacagacattattcatttcaacatgtaactttgggcaaaatcaagatacgcgcagaagaatactttccgaatgaaagttaaaggtgttttatttatagatggggagagtcttcgatagtagtgaggttgacagatatccgctgcctgatgagcaattatgcccaatgaatctacctcattgggcataatttggaactcatcagatagcttttgccatcttcagattacacgggctcatctgccagttgaatgtgccgtttccgctttcatcaagcgttacgctggcaatggcgctggtggtaaacataggcggcgtttcgcccggacataactcggcaaccagatacccgactaacggtaagtgagagatcaccagtacgctagcaacaccttcattggtcaacgcctgcaaataggcactgaccagaccaacatcgccgcagggcgttaactccggcagaacttctgcactggaaggcaggttcagacaatcccctacttcttccagtgtttgctcggctcgcaggaacgggctcaccagaacgcgttcgatttccactttttgacctttcagccagttcgccatcaggcgagattcgtcacaaccattagtggtcagaggacgaacggaatcactggcggcatcgagggctgcgtcgccgtgacgcatgataaaaacttgcatattgcaccgcttttgttaaccagattcgcccgttttctttcatctgaaaccagagaaagaaaacggtggccggcattgtgccttatccattcaccgaatgaaacgctgttttttacctcaatggcgtaagtatagtcaatatgcgtttacattttgaccaacactccgccattcagcgcggattcatatagctttgaccttcttattgcaggtcagttgcagttgttttccaaaaactttccccacgcgcgcccatctcgaccaaacgctcgcaaggggtaaaacgggaaccatactgcgtggcaagtcgttgcattattgcaaccacttcgcccgcgccgagagaatcgatatagcggaacggtccaccgagaaatggcggaaaaccaatgccaaataccgcgccaatatccccgtcacgcacgctacggataacctgctcatcaacacaacgtactgcttcattcagcatcaacatcacacaccgttcagcaacctgcggtgcggagattcgcccctgcccttgtgtgccaatcagcgggtaaatggcgggatcgacctgttttttgcttttacgccctttctgaccataaagatagaaaccccggccattttttctgcctttgcgatcgtcgttcaaaatactagaaacaacatttgcaggcgcgctaaaacgttctccataagcggcttccagtacaggaataattttagtcccggtgtcgattcctacctcatccaaaagttggattgggcctaccggaaaaccaaatttcactagcgcggcatcaatgtgctctacccgttcaccttgggtcaacatgcggatagcttcattaatgtaaggcgctaagatgcgattgacgtaaaaaccggctttgtcacgcacgacaattggcgttttaccctgttttttcgccagttttactgtggtagcgatggtttgcgcgcttgtccccgcatgaggaataatctccaccagcggcattttttccaccggactgaagaaatgcaggccgataacttgctcaggtcgcgtggcgtgagcggcgatatcaccaatcggtaaagaactcgtattgctagcaaagatggtatgagcggcgcaattttgctcaacttccgccaccatctgttgtttcaattcgagattttcaaacaccgcttcaataatcagatcgcgatgggcaaagccgcgatagtccgtcgttccggagattaatgccagctgtttgtcacgttcgctggctttgagatgacgacggcgaactttgccctccagctgatcccaactgtacttcagcgcatgatttatgccctgcgggttgatatctttaattctgaccggaatccccgctttacaagcagtgacataagcaataccgccgcccatcaagccaccacctaaaatccccacgctgtttaatggcgcaggcggcgcatcactgccgggatctttcttcacgtccgtactggcaaaaaagatactacgcagcgcctggctttgtggcgtcatcgccagttcgccaaacgcccgagcttcggcgtcataaccgctgctggtgccctgcgctaatcccgtttcaacaacctccaggatgcgttctgtcgccggataattgccttgagttttgtgttctgttttcttgccgaccattttgaacagcagcgcacgacctaacggccccgccagaatacgctcgcgtacaggtagagggcgggaagatgggcgctccttctttgccagctcaacagcggcttccagcagaatggagtgcggaacaacgtcatccaccagccccagctttaatgcctgtttcgcccgaagttgttttccggtgaggatcatctctaatgctgtgctgacgcctatcagacgcggtaaacgctgggtgccgccactaccgggtaacaatccaagttgtacttcaggcaaaccgagcaccgttttaggatcgtcagtacaaacgcgaccgtggcacgccagcgccaactccagcccaccacccaggcaagcgccatgaatagccgcgataacctgaatgggcaaagcatgaatctccgccatcaactgttggccctgccgcgccagagcttccgcttcttgcgccgttttgcagttgccgatcatgttgatgtctgcgccagcaatgaagttgtccggtttagcggagacaaacaccacgcctcgcaactctttgttttcacggagttgcttaataatggcgcgcacctggctggcaaactccgccttcagggtattcattttctcacccggtacgtcgatggtgataacggcaatgttgtccagacgaacattaagggtaaacgcacttgtcatttccattattccgcctccagaaccattgccgcgccaagcccaccggcagcacaggcggtaactaaaccaaatccaccgccgcgacggcgaagttcatgcaatgtctgggtaatcatccgcgcgccggtcgccgcgaagggatgcccgtaagcaatgctaccgccaagcacgttaaatttgctatcgtccacttcgccagtggcatgtgcacgccccagtgcttcacgagcaaaacgttcactacccagcaactgaatattcgccagcgtctgagctgcaaaggcttcgtgcatatcgatcaatgtcagatcgctcatcgtcaaaccggcacgctccagcgccagcggtgtactccaggctggaccgagcaacatgtcctgccagacatcaatcgcagtaaatgcgtagctgcgcagataccccagcggcaccagccctaattctttcgcccgggattcagtcatcaggatcaccgctgccgcgccatcggtcagcggcgtactgtttgccgccgttaccgttccgtgtttgcgatcaaacgccgggcgcagctttgcgtaatcggcaaggctggaattaccgcgaatattgttgtcttcgacaagcggttgtttataaggagggataaaggcagtcatcacctcttctttgagttttccgtcactccatgcctgagcggcacgctgatggctacggtgcgctaatgcatcttgctgttctcgggtgatgccgtaggttttcgccatttgctctgcggtgtcgcccatccgcaagccggtagaatattctgctaccgcaggtggtacgggcattaagtcgcgcaaacgcaggcgagagaagagtttcagtcgctggctcatggtacgagctttgttgacatcaaccagcacgcgcgccagttttttactgacgccaattggcaatacgctagaggaatctgccccaccggcaatccccgctcgaatagttcccgccatcaggctttctgcgacgtttgcaactgcctggaaactggtagcgcaagcgcggctgacgctgtaagcatcggtatgtacattcattcccgtaccgagaacaatttcacgcgcaatgttgggggcttcaggcatttgtacgacctgaccaaagaccagttgttcaatcacttcggcggggatctcgctgcgtgccagcagttcgcctaccaccatcttccctaaatcaaccgcgggaatgccatgaaaagccgtcgcctgacgggcaaaaggcgtacgtaaaccgctaacaatggcgatacgatcgccctggcgggtaaccagcggtaaaacctgacccataacactcccctgtaaaaaaataaataaagtggtctgacctgatcatagtcttaaccatttttttacatttagccaagtggagaaaagggaaagtgggagctatgacacagagagaaaagaagaagagaaaagaaaacgcccctgccagcaactgacaggggcgtacgtacccgagaggaattaacgcagacccagctggaaaatcagcatttcagcttcgcaggcaaaagtgaaatcgatatccaggcgcacaccgtcagactcttcagtgaaagtcggggtgattttgcaaggttcagattccacgctacgggctttttcagtcagcgccgccagcgtttgctctgcttctgcgcggtttgcaaacacgcggctgtaagacgcggtgcagtcggagttgtccataatggtgccaacatccatacagcagcaaaccggggtttcatcagcactacatttactcatcgttgatttcctctgtatgtgcacccaaggtgccagataaacgttgtggatattttacgcttccggaaagtgctgctccagttgttaattctgcaaaatcggataagtgaccgaaatcacacttaaaaatgatctaaaacaaaattcacccgaatccatgagtgcgccacctccaaattttgccagctggatcgcgtttcttagatcatatttgaaaaaagatagaaacatacttgcaacattccagctggtccgacctatactctcgccactggtctgatttctaagatgtacctcagaccctacacttcgcgctcctgttacagcacgtaacatagtttgtataaaaataaatcattgaggttatggtcatgagccagaaaaccctgtttacaaagtctgctctcgcagtcgcagtggcacttatctccacccaggcctggagcgcaggctttcagttaaacgaattttcttcctctggcctgggccgggcttatagtggggaaggcgcaattgccgatgatgcaggtaacgtcagccgtaaccccgcattgattactatgtttgaccgcccgacattttctgcgggtgcggtttatattgacccggatgtaaatatcagcggaacgtctccatctggtcgtagcctgaaagccgataacatcgcgcctacggcatgggttccgaacatgcactttgttgcaccgattaacgaccaatttggttggggcgcttctattacctctaactatggtctggctacagagtttaacgatacttatgcaggcggctctgtcgggggtacaaccgaccttgaaaccatgaacctgaacttaagcggtgcgtatcgcttaaataatgcatggagctttggtcttggtttcaacgccgtctacgctcgcgcgaaaattgaacgtttcgcaggcgatctggggcagttggttgctggccaaattatgcaatctcctgctggccaaactcagcaagggcaagcattggcagctaccgccaacggtattgacagtaataccaaaatcgctcatctgaacggtaaccagtggggctttggctggaacgccggaatcctgtatgaactggataaaaataaccgctatgcactgacctaccgttctgaagtgaaaattgacttcaaaggtaactacagcagcgatcttaatcgtgcgtttaataactacggtttgccaattcctaccgcgacaggtggcgcaacgcaaagcggttatctgacgctgaacctgcctgaaatgtgggaagtgagtggttataaccgtgttgatccacagtgggcgattcactatagcctggcttacaccagctggagtcagttccagcagctgaaagcgaccagtaccagtggcgacacgctgttccagaaacatgaaggctttaaagatgcttaccgcatcgcgttgggtaccacttattactacgatgataactggaccttccgtaccggtatcgcctttgatgacagcccagttcctgcacagaatcgttctatctccattccggaccaggaccgtttctggctgagtgcaggtacgacttacgcatttaataaagatgctagtgtcgacgttggtgtttcttatatgcacggtcagagcgtgaaaattaacgaaggcccataccagttcgagtctgaaggtaaagcctggctgttcggtactaactttaactacgcgttctgataacgcgttcgcctggataaagtcacctgcatagcaggtgactttaactcccccacttcaccgaaagtagtgtcctcattgcttacctcctgagttttgcaaacagcctgttggcagcttgccctttcaaatcaataagcggtatccacagacaaacctgaagggaaaggcatattttcaggcgttctgctcgtccttctcaaagagtttacttttctgcatttccaggatactcccccccccctggctattgtgcgctcatacactcaaattaaagataggttctaaataaatgagcgttttttgatagtctatttcattaggtaatatatatttgtaacaaatcaatcaaaatggaataaaatcatgctaccatctattagtatcaacaataccagcgcagcttacccagaatccatcaatgaaaataacaatgatgaagttaatggattagtacaagagttcaaaaacctttttaatggtaaggaaggaataagcacctgtattaaacatctacttgagcttataaaaaacgccatacgagtaaacgacgatccttatagatttaatattaataattccagtgttacttatattgatattgactccaatgatacagaccatattactattggtatcgacaaccaagaaccaatagaattacctgcgaactataaagacaaagaactcgtccgtactatcattaatgacaacatagttgagaagactcatgatatcaataacaaggaaatgatcttcagcgcattaaaagaaatatatgatggagatcctggttttatcttcgataagataagtcacaaactcagacatacggtaacggaatttgatgagagcgggaaaagcgaaccaacggacttatttacctggtacggtaaagataaaaaaggcgactctctcgctattgtaattaaaaataaaaacggaaatgattacttatctctcggttactacgatcaggacgactaccacattcaaagaggaattcgtattaatggtgatagtctcacccaatattgtagtgaaaacgccaggagtgctagtgcgtggtttgaaagcagtaaagctatcatggcagaaagttttgcaactggttccgatcatcaggttgtaaacgagctcaacggggaaagactgagagaaccaaacgacgtttttaaacgttatggtcgagcaataagatatgattttcaagtggacgatgcaaaatataaatgcgaccatctaaaagaaatagtttctactttagtcggtaacaaaattaacgttggccattctcaaaaaatatataagcattttaaggatctcgaaggtaaaattgaagaaaggcttcaaaatcgccaggctgaatatcaaaatgaaattaatcaaccatctgcgccaggtgttaattttgatgatatttaaaattatttttccagttttttgatttttcaacagctgaatatcggaaatagtcagtgacgaacatcagtatttttacataattacgtctaggtcattgtcggtttatctccttttacttgtggtaattgagggataacaacaaaaaaggtgagttttgcgactcaccttttttatttgtttcttattcagaatcaatatcttttaaatcatcctgaatcgcttgtgcgttcggattttcctgcggtttgagttcgccgccattagcgatgaaatcatgacgctggaagtacgcttcgcgcaccataatataaggatcggagctctgacgcagcagaccatcggaatccagcagctgagcgcgggtttcgatcccttcaagcgtccatttacccacagacatcggccaggtcagccaggaaagaaccgggtaaaaaccatccgccatatcaccaccgtcatcacgcagcgtgaagctaccgtagaacggtaactgaacgtaaggcccataacccacgccataatgaccaagcgtactaccgaagcggtgaggttcagtccgttgcagtttcgggttcgccatccctgcaacatcaataaaaccgcccatccccaaaatggtgttcaggaaaaagcgggtaaagtggaccatcccctgataagggtcgccctgcaagaagtagttaaccatcaccgcaggttcttcaaggttgccagtaaagttgctcaaaccgttacgcgccggttgcggaacataatcacgccaggcgacagcgaccggtcgaacaatatacgggtctaatacattgaagttgaagttgtacatggtgcggttgaacccttctaacgggtcagaacgcccttgctgatctgtaccggaactcgcacaccccaccagaagcgtagttcccagagcaagcgcgctcaggcgaagcttcataaatgtctccctgtttttttatggcttatgcagtttgccatccatgacggaacgataccgtatccgcctgtttaggtgtgggcgattgtaacagcacgtcaactgatgtccagacgccctgatttgctgatttgatcatagcctggtaatcgccgccctgtaggctacttgattctatagaaacagaaaaaggcaaacgcagccttttctacattttcagagtaactcccgtcagttgcgagcaaaaaagccgctacgctttagctatacgtgctaattcaagagaagagaccatggacaacgacaaaattgatcaacacagcgacgaaattgaagttgagagcgaagaaaaagagcgcggcaaaaaaatagaaatagatgaagaccgactcccctcccgggcgatggcaattcatgagcatatccgccaggatggtgaaaaagagctggaacgcgacgcaatggcgctactgtggagtgccattgcggcgggtctgagcatgggcgctagcttactggcaaaagggatatttcaagtcgaactggaaggtgtgccgggcagcttcttgctggagaatctcggttatacctttggttttattatcgtcattatggcccgccagcaattatttaccgaaaataccgtgactgcggtactacccgtcatgcaaaaaccgacaatgagcaacgtcggcttacttatacggttatggggcgtcgtgctgctgggtaatattctcgggacaggtattgcggcgtgggcatttgaatatatgcctatcttcaatgaagaaactcgcgatgcatttgtcaaaatcggcatggatgtgatgaagaacacccccagcgagatgtttgccaacgcgatcatttccggctggctgatcgccactatggtttggatgtttcctgcagcgggtgcggcaaagattgtggtgattatattgatgacctggcttattgccctgggtgacaccacccatatcgtggtcggttctgttgaaatcctctatctggtgtttaacggtacgctgcactggagcgatttcatctggcccttcgcactacctactttagcggggaacatctgcggcggcacctttatcttcgcgttaatgagtcatgcacagattcgtaacgacatgagcaataagcgtaaagcagaagcacgccaaaaagcagaacgtgcggaaaacattaagaaaaattataaaaacccggcataaatggcgagggtttaagcaatcgagcggcagcgtacttaccccgcactccattagcgggtatactcatgccgcattgtcctcttagttaaatggatataacgagcccctcctaagggctaattgcaggttcgattcctgcaggggacaccatttatcagttcgctcccatccgtaccagtccgcaaaatcccctgaatatcaagcattccgtagatttacagttcgtcatggttcgcttcagatcgttgacagccgcactccatgacgggtaaaaagtggataaaataattttacccaccggatttttaccctagagccatacagcctcacactcgatgaggcctgtcagtttcttaaaatatcctgatctaccatcgccgtcatagagcgtatttttattacctgatttgcaggttcgattccctattcggagatagcactcatgcaacacgaactacagcctgatagtctggttgatttgaaattcatcatggctgatactggctttggtaaaaccttcatctatgaccggattaagagtggcgacctgccaaaagccaaagttatccacgggcgagcaagatggttatatcgtgaccattgtgaattcaaaaataagctcttaagccgcgccaatgggtaaaatagcgggtaaaatatttctcacatctaaaaaacaccattccaatcaatcccctgctgcttcaagtagatgtctgcaggggacaccatccttgtgtttatccctaaaaccacataaaaaccgtaaattaaattcgaactagcaggccgaataaggcacaccaggaactcgtggttttattcattaactagtggtttttacctgttctcttagccagataataaacgcttcaatttttggccactgcctgcccggtaatgtggtgatgtaataatgctgatggcatttcaccgtcatatcgccaaacggcgcgacgagctcaccactggcaagccttttttgtaccaggcgttttcttcccatcgccaccccaatatgattcatcgcggcaataacagctaaatcagaacgatcaaagccaattccagaagatgtcggcaaattaaccgcataatgttgcgcccaactatgccattcatccgtaccggagtcgttgctccatgcctgtctgtcatggagcaacgtacagtgacacaggttaattaccgtgttggttaaagcatgtctttgagcgtattccgggctacatactggcaggatttcttcatccatcagaaagtgatgagtgagttgcgcactcggcgcatcatcaaagtagatcgccaaatcgattccggcacgttgcagattgacgttgtcattaccagtgagcacggtgaggctaatagacggataccggcgtgtaaagtcacctaatgcgggcaccaaccagcattgggcgatagagggccgggaatacagagttaacgttccgcttaactcctgatttttgatatcaagaatttcctggttcagggtatccaggctgctttttagcgcccaataaacacgtttcccctcgtgcgttaattccactttgcgatgggaacgaacaaacaactgaatgcccaattcttcttccagctgattgatacggtgacttaccgcactggggctcaggctcaattcctctgccgccagggcgaaggactgatgcctggcagccacttcaaaagtatgcattttacttaattgccagccgttaagcagccgatttcttatttcacgaaggggttccataatcacctcatttttcgcttaagtgtaaaaaaatagcggcaaaatttcagctatgagatgagctaaagtgaaccatatctcaattcaccttcatttttagatgtaaatcactccattgatgcaatttacctcatgtgaaaggcaaattttatcgtttgtcagcctgcgttgtttttttgtccaatatcatcaggttaatcacaggggaaggtgagatatgcactctcaaatctgggttgtgagcacgctgcttatcagcatcgtgttaattgtactgaccatcgtgaagttcaaattccacccgtttctggcgctgttgctggccagcttcttcgtgggaacgatgatgggcatggggccactggatatggtaaatgctattgaaagtggaattggcggaacgctggggttcctcgcagcggttatcggccttggcacgatactgggaaaaatgatggaagtatccggggccgcagaaagaattggtctgacacttcaacgctgccgctggcttagtgttgatgtcattatggtgctggttggcctgatttgtggcatcacgctgtttgttgaagtgggcgtcgtgctattgattcctctggcttttagtattgccaaaaaaaccaataccagtttattaaagcttgccattccgctatgtaccgcattgatggcagtgcactgcgtggttcctccacatccggctgctttatatgttgccaataagctgggcgcagatatcggtagcgtgatcgtctacggtttgctggttgggctgatggcaagtctgatcggtggcccacttttccttaaatttctgggtcaacgactgccctttaaacctgtacccacagagtttgcagatctcaaagttcgcgatgaaaaaacactaccgagtttaggcgcaacgttattcaccatactgctacccattgcgctgatgttggttaaaacgattgccgaattgaatatggcgcgtgagagtggtttgtatatcttggttgagtttattggcaaccctatcactgccatgtttatcgccgtgtttgtcgcctattatgtgttgggtatacgccagcatatgagcatggggacgatgctcacacatacggaaaatggcttcggttctattgctaatattttgctgattatcggggccggaggcgcattcaacgccattttaaaaagcagcagtctcgctgatacgctggcagttattctctccaatatgcatatgcacccgattcttctggcctggttagtggctcttattctgcatgcggcagtgggctccgctaccgtggcaatgatgggggcaacggcaattgttgcacccatgctgccgctgtatcccgacatcagcccggaaattattgcgattgctatcggtagtggtgcaattggctgcactatcgttacggacagccttttctggctagtgaagcaatattgcggcgctacgctcaatgaaacatttaaatactatacgacagcgacatttatcgctagtgtcgtcgctctggcgggcacattcctgctgagttttatcatctaagcgcaaagagacgtactatggaaaacgctaaaatgaacagcctcatcgcccagtatccgttggtaaaggatctggttgctcttaaagaaaccacctggtttaatcctggcacgaccagtttggctgaaggtttaccttatgttggcctgaccgaacaggatgttcaggacgcccatgcgcgcttatcccgttttgcaccctatctggcaaaagcatttcctgaaactgctgccactggggggattattgaaagtgaactggttgccattccagctatgcaaaaacggctggaaaaagaatatcagcaaccgatcagcgggcaactgttactgaaaaaagatagccatttgcccatttccggctccataaaagcacgcggcgggatttatgaagtcctggcacacgcagaaaaactggctctggaagcggggttgctgacgcttgatgatgactacagcaaactgctttctccggagtttaaacagttctttagccaatacagcattgctgtgggcagtaccggaaatctggggttaagtatcggcattatgagcgcccgcattggctttaaggtgacagttcatatgtctgctgatgcccgggcatggaaaaaagcgaaactgcgcagccatggcgttacggtcgtggaatatgagcaagattatggtgttgccgtcgaggaaggacgtaaagcagcgcagtctgacccgaactgtttctttattgatgacgaaaattcccgcacgttgttccttgggtattccgtcgctggccagcgtcttaaagcgcaatttgcccagcaaggccgtatcgtcgatgctgataaccctctgtttgtctatctgccgtgtggtgttggcggtggtcctggtggcgtcgcattcgggcttaaactggcgtttggcgatcatgttcactgcttttttgccgaaccaacgcactccccttgtatgttgttaggcgtccatacaggattacacgatcagatttctgttcaggatattggtatcgacaaccttaccgcagcggatggccttgcagttggtcgcgcaagtggctttgtcgggcgggcaatggagcgtctgctggatggcttctatacccttagcgatcaaaccatgtatgacatgcttggctggctggcgcaggaagaaggtattcgtcttgaacctagcgcactggcgggtatggccggacctcagcgcgtgtgtgcaagtgtaagttaccaacagatgcacggtttcagcgcagaacaactgcgtaataccactcatctggtgtgggcgacgggaggtggaatggtgccggaagaagagatgaatcaatatctggcaaaaggccgttaataacgtttcaacgcagcatcgcaatcctttccctgggtgagcgatgctgccgatggcgcagacttaagatccccggtcttacccgctataaccccctccttttatcatcacccaacgcctttcgctgtaaacggcggtttcgcaaaccaaaccaaaaccgtaagtaagataaaagcaatagccgccatacggaaaatctcatttgcagaaatagaaagactctgctgggttatttcattattaatttcattaagaactccactaaggctaccataatatttatccataatttgactgctactattaaacacggggttaaattgatcgatggttgctgtcaactgactatggtgtaagctttcgcgtcgtccccacagcgtcattgtcaagctcgtaccaacacttccactcaaggtacgaaaaaaattactcatactgctggcattggcaaatttattatctggcaagccactaaagctaatcgttgttaagggtaaaaagaaacaggcaacggcgaatccctgaaaaaactgcggcaaaatgatgcctgtaaaatcaatcgttggcataaatgtcacagaacgccagtaatagcaaaccgcatacatcaaaaaactaaatgtcactaacaaccgcatgtctattttgttgccataacgtcctatcaaaggactaattaatagtggcatgatgccgatgggcgcataagcaagtccggcccatatcgcattataccccatcgtttcctggagtaactgcggcataaggacgatcgctccagagtaaaataaatacgcgcatgtgatactcacaataccaatggtgaagttacgggacttaaacaaactgagatcaagaatcgggttctcactggtgctctcccaaatgactaaagagatcagagaaataacacttactactgttaatattattattgtactgctgttgaaccaatccagatcgcgccctttatcaagcataatttgcaagccaccaacaccgagcactaacagggtcagtcctggtagattcattttgaccggactagtctcagtttctcttcctttaagtaaggttaagcataatgtcaggacgataatccccatagggacattgattaaaaatatccaaccccagctaaagttatcacaaatataaccgcccaatatcggcccacatatcggagcgataatcacggtcatactccataatgccagagcaaatgttcttttttctggcggataattccttaataataaactctgactcagtggaattaacggccccgccattaacccctgaacgactctaaaaaatatcagcacatcaagattggtgcttaggctacacattaaactagacaggctaaaaaaagtgacactaagtaaaaataatcttaattcgcctattctttgtgccaacctgccagtaacagggatcgcaatggcatttgctacaccaaagctggtgataacccaggtgccttcgtctgtacttgctcccagaaagccagatattgtcggtattgcgacgttagaaatagtggaatccaacatttgcataaatgtcgctaaactcaatgcaatagtgacgcaccataacgtcccaccggttaatggtgccggagtacttttagtgattgccattaaagttgtccattatggctaataatgttgctaatttctttttctatcggactggtatcgataactaaagccttactggtataagccggcatggaggtcacggtactagccagctcaggcatctcggcaatgtcttcgttcttcgtatcaatagttgctgtcatgcttaaaccaatacgcaaggggtgttccatgagttcttttggatcaagagaaacttcaaccggtacacgctgaacgattttgatccagttccctgtcgcattttgtgcaggtaataaggagaacgcattgccggttcccatattgatccctgtcacccgaccatgaaacacaacattttcaccataaagatcgctgataatattgacgctttgaccaatccgtacatccgtgagttgtgtttctttaaagttggcattaacccacatttgacgtgccggtacgacagccattaagctttgtccggggctcactgtttcgccgacctgaacacttctctgggcaatatagccggtaaccggactcttaatatccgtacgtttaagcgccaaccaggcttctttagttgcatccgccgcttcaacgacttgtggctgacggtttaatggtgtgttcattactaaagctttattcgctttataagcctggatagcggcattcaatgccgctttgctacttattaacgtatctttggtatgctccagcgtttctttactaataaccccctgcttcgctaacggcactcgacggttataatcttctaaagattgttgatactgaatacgtgcactagcgacttcggcactgtattgtttatcctgtaagtatagtttattcgtttgccgaacaatatttgccagattatttttagctttattgagtgcgatagtggcatcagttttatccagactaactaaaatgtcaccttgtcgaacgtagttcgtatctttatgattaacgacagtgacactaccactgacttgtgcagaaattggatctgcattccccgtgacataggcgtcatctgtactaatcatgtcttctaattccatactccaataggcataggcaccactaaacgcaataaataaaactaccgccaataaagaaaagtattttcttctgttagaatgttttttattactattaatctgttccactattatctctcatttctcatagatgaaatttatgaattgaatgaaaagagcattcattcttcatatcaaacacagtgcatgtgttgcacattatcccaggaacgttggaggcctaatttaaatgaggtgcaaaaaaaacaacagaggactaaaccgtggcttttgcaatacaattcttacgcctgtaggattagtaagaagacttatagtgccaacttgaaactataaatcatcggtacaatccctgattttattgttgacatttcatttatgccgactatttatatggtatacttgtcgaattatcttaaaggaagctcagattttcttatttttattgagaaaatgagatgacgccttatgtctgtattactacagggagaagggagatgcttcattgcaaagggaataatctatgaacgcaataattattgatgaccatcctcttgctatcgcagcaattcgtaatttattgatcaaaaacgatattgaaatcttagcagagttgactgaaggcggaagtgccgttcagcgggtggaaacacttaagcctgatatcgtcatcattgatgtcgatatccccggagttaacggtatccaggtgttagaaacgctgaggaagcgccaatatagcggaattattattatcgtctccgctaaaaatgaccatttttacgggaaacattgtgctgatgctggcgctaatggtttcgtgagtaaaaaagaaggcatgaacaatatcattgcggctattgaagctgcaaaaaatggctactgctatttccccttctctctcaaccggtttgttggaagtttaacgtccgaccagcaaaaactcgactccttaagcaaacaagaaattagtgtcatgcggtatattcttgatggcaaggataataatgacattgctgaaaaaatgttcatcagcaacaaaactgtcagcacttataaaagtcgcctgatggaaaaattagaatgtaaaagtctgatggatctttacacattcgcacaacgtaacaaaatcggctaaccacatgaagtttttaccctatatttttcttctctgttgtggtctttggagcaccataagtttcgcagacgaagattacatcgaatatcgtggcatcagtagtaacaaccgtgtcacacttgatccactacgtctgagcaacaaggaattacgttggttagcgagcaaaaaaaatcttgtgattgcagtacataagtcccaaacggctacgttgttgcataccgatagccagcaacgggttcgtggtattaatgctgattatttaaatcttttaaaaagagcgttaaatatcaaattaacactccgggaatacgcagatcatcaaaaagcaatggacgcgcttgcagaaggtgaagtcgatatagtgttaagtcatttagttactagcccgcctcttaataatgacattgctgcaaccaaaccattgataattacctttccggcgctggtaaccacccttcacgacagtatgcgaccgcttaccagtccaaaaccagtaaatattgctcgggtagcaaattaccccccagacgaggtaattcatcaaagttttccaaaagcaacaattatctcttttacaaatttatatcaggcattagcatccgtcagtgctgggcacaatgattactttattggtagtaacatcattaccagcagtatgatttcccgctatttcactcactccttaaatgtagtgaaatattataacagcccgcgtcaatataattttttcttgaccagaaaagaatctgtcattcttaatgaagtactcaatagatttgttgatgctttaacaaatgaagttcgctatgaagtaagtcaaaattggcttgatacaggaaacctggcctttctgaacaaaccattagaactcactgaacatgaaaaacagtggattaagcagcatcccaatttaaaggtgctggaaaatccttacagccccccctattctatgacggatgaaaatggcagcgttcggggcgttatgggggacattcttaatattattaccttgcaaacaggtttaaatttttctccgatcaccgttagtcacaatatccatgctggaacacagcttagccccggaggatgggatataatacctggcgctatttatagtgaagatcgagaaaataatgttttatttgctgaagccttcataacaacgccttacgtttttgtcatgcaaaaagcgcctgacagtgaacaaacattaaaaaaaggaatgaaagttgccattccatattattatgagctgcatagccaattaaaagagatgtatccggaggttgaatggatacaggtcgataatgccagcgctgcatttcacaaggttaaggaaggtgaacttgatgctctggtcgcgacacagctaaatagccgttacatgatcgatcattactatcctaatgaactttatcattttcttattcctggcgttccgaatgcaagccttagcttcgcttttcctcgcggagaaccggaacttaaggatattattaataaagcactgaatgcaattcccccaagcgaagttctgcgcctgacggaaaaatggattaaaatgcccaatgtgaccattgacacatgggacctatatagcgagcaattttatattgttacgacattatccgttttattagttggcagtagccttttatggggattctacctgttacgcagtgttcgtcgtcgtaaagtcattcagggtgatttagaaaaccaaataagtttccgaaaagcactcagcgattccttaccgaatccaacttatgttgtaaactggcaaggtaatgtcattagtcataatagtgcttttgaacattatttcactgcggattactacaaaaatgcaatgttaccattagaaaacagtgacagtccctttaaagatgttttttctaatgcgcatgaagtcacagcagaaacgaaagaaaatcgaacaatatacacacaggtatttgaaattgataatggcatcgagaaaagatgcattaatcactggcatacattatgcaatcttcctgcaagtgacaatgcagtatatatttgtggttggcaagatattactgaaacgcgtgatctaattaatgcactcgaggtagaaaaaaataaagcgataaaggctaccgtagcaaaaagtcagtttctggcaacgatgagtcacgaaataagaacaccaataagctctattatgggcttcctggaacttctgagcggttctggtcttagcaaggagcaacgggtggaggcgattagtcttgcctacgccaccggacaaagtctcctcggcttaattggtgaaatccttgatgtcgacaaaattgaaagcggtaactatcaacttcaaccacaatgggtcgatatccctactttagtccagaacacttgtcactctttcggtgcgattgctgcaagcaaaagcatcgcattaagttgcagcagtacgtttcctgaacattacctggttaagatcgaccctcaggcgtttaagcaggtcttaagtaatttactgagtaatgctctcaaatttaccaccgagggggcagtaaaaattacgacctccctgggtcacattgatgacaaccacgctgttatcaaaatgacgattatggattctggaagtggattaagccaggaagaacaacaacaactgtttaaacgctacagccaaacaagtgcaggtcgtcagcaaacaggttctggtttaggcttaatgatctgcaaagaattaattaaaaatatgcagggcgatttgagtttagaaagtcatccaggcataggaacaacatttacgatcacaatcccggtagaaattagccagcaagtggcgactgtcgaggcaaaagcagaacaacccatcacactacctgaaaagttgagcatattaatcgcggatgatcatccgaccaacaggctattactcaaacgccagctaaatctattaggatatgatgttgatgaagccactgatggtgtgcaagcgctacacaaagtcagtatgcaacattatgatctgcttattactgacgttaatatgccgaatatggatggttttgagttgactcgcaaactccgtgagcaaaattcttccttacccatctgggggcttacagccaacgcacaggctaacgaacgtgaaaaagggttaagttgcggcatgaacttatgtttgttcaaaccgttgaccctggatgtactgaaaacacatttaagtcagttacaccaagttgcgcatattgcacctcagtatcgccaccttgatatcgaagccctgaaaaataatacggcgaacgatctacaactgatgcaggagattctcatgactttccagcatgaaacgcataaagatctacccgctgcgtttcaagcactagaagctggcgataacagaactttccatcagtgtattcatcgcatccacggtgcggctaacatcctgaatttgcaaaagttgattaatattagccatcagttagaaataacacctgttagtgatgacagtaagcctgaaattcttcagttgctgaactctgtaaaagaacacattgcagagctggaccaggagattgctgttttctgtcagaaaaatgactaaatagcggctcccacaatgttcaaatgtgggagctatttaccagcacatcttacatttaactactgaactcctggcgaatttgttccccatgctggtcgagcgttgccgctcccggcataacatgcgggtccgcgcagccgctgatttttatcggattacccggcatcattattcccccggcttcaatcaacatatttctcgcctgagtttgtggcaatttaatggcctcagccacacttaataacggcgcgacgggtacaccaacttcatgtattctggctaaccaaacttcagctgcctgcgtttttaacgtccgctcaatatattgtttaagaatagcctggttttgtacgcgtaaaatattgctgctaaatcggggatcattaaccagttccgtaagctccagtgcctggcataacgcagaaaaaagcttgtcattaccacaacaaatcgtaatcggcttatcctgagtattgaaaacatcaaaaggtgccatgtagggatggcgatttcccagacgttgtggactcttcccagttgcgatatatgccatcagaccatgctccagaaaactcagcgtggcatcaaacatcgctatatcgacatgcgcccctctctggctcttttcgcggccataaagtgcactcactattccgctgaataaatagacaccgccgcatagatccgcaagagatgtaccaacgcgcactggcggagcatcaggatatcctgtttccatcattatcccgctcattgcctgaatgatggtatcgtaggcaggagcatcttttagcggaccggtatgtccgaaaccactgctactagcatatatgaggcgcgggttgatttcttgaagcgtttcccaactaaaccccagtttttccattgtacctgggcgaaaattctcagctaatacatcagcttgtttgagcatatttataaatatacttttatcgtgatcattctttaaatcaagaaccacactctctttgccatgattaataaaactgtaatagagactctgtccatccacatagggaccaaatgtgcgggtatcatcaccatgacccggcggctcaactttaattacccttgcgcccatattacaaagaagttgagttccgaaaggtccattaaggacatgtgtcatatcgataactaataagccttcaaacggccctttgctttcattatttgtcatttgcttatgccttgaaaaaagccgaaggtgaaaagacacttcggcatttatgtaaaatcaataacatgattaattaactaaccagtcgactgacataaatccacaagggagccgtgacgacaaagcccagtacgctcacagccaaactcgctgtaccagtacgggtgtagacattaaaccggctggcaataatgattccggagaatgccggcggtaatgcgcctgccagtaccatcatctgcagatgttcgctgttcaaatgacatgccataccaacgagaagcagtgccagtggcatcagaatcagcttcaggaaggtgttataagcaatttcggcactgaactcgaatttatgtgcagccagagtcaaccccgcagcgaataccgctaccccactgttagccttcgcaatcagattaaaggttgggtcccatgctgccggaatttttaccccaaccaacaccaggatcgttgccagaacaggtgcccatactactggctcctttgccgcagaaattaatgcgctcagattactattcttcttaccatccgctccactagaaggattcagcaaatacagaccaataggaatagtaattgcgttaacaataatagaaataattgctaccactaaacctgtacttacggaatcaccataaataggatcgagaactgcaaaccccaggaatccaatggtaggactacctgcaattaatgcacatacagctgcttctgcatgggtacgtttaaaaaatttgtagcaaccgaaccaggagaaaaagaaacatccgacaataaccacaagacttacaagggtcagacgagtgtccgcaaaaatcatttccctgtttgcccgagtaatagatacaaatagagccgcaggaagcgcgtagtttaataccagtttattaaatgcccgagcttgatcttcactaaatgtttctcgtctgccgctaaaataacccaacagcatgattacgataataggcaataaatcgccaataaaaaatgttagcataatagtatttccgataagggtcccctcaccatcgcataatgagttggcaagaggagacgatgtcagtatttaattaccagcgacttgttttgggttaagtttggtaatatggccactttcagttcctgctgcagggtcgatgaccacattaataatggtcggtttgcggctctgaataccggtggttaaagcatgacgaagttcatctgtcgtggtgacgttatagccaacgccacgaaacgcatccattaatttgtcataccttgcatggtgcaacagatccgttggacttggtgcaccagcgccactgagatcaacaccgtctcctctgtagatgccgccattattaaaaataacgatcgtcaccggcaggttatatcgacaaatcgtttcaatttccatcccactgaaaccaaaagcactatcaccttcaatggcgacaaccggagaaccagaagtcacgctagcaccgatggcatagcccataccgatgcccatgacaccccaggtaccacaatccagacgacgacgtggtttatacatatcaataatatttcgtgcattatccagggtatttgcaccttcattaactaaataaatatcctggttctcgcgcaatacgtcgcgcacagcacttaatgcattaaagtaatttaatggttgagtatctgtacttaatttttcatgcattttttgtgcattttgctgcttgtggatatttaaaatatcgcgccataccagtggagtcgtaaatgtgttttgtttcagttctgccagcataccttgcatactggatgcaatatcaccaacgactggcacagcaatggggcggttgctgtcaatttcctgcggttcaatatccagttgaataaactgtgtatctgccgcccatccttttttaccgtgtgccaataaccaattcagtcgtgcaccaacaagcatgacaacgtcagcatttgccagggcaaagctacgcgcagctgccgcagaaagtggatgcgtatcttcaaggatccctttcgccatagacattggcaggaatggaatctgagcactttcaataaattcacgaagctgttcatcagcttgactatacgccgcgcctttgccaaggataattaatggccgttcagcttttgctaaaaggctaattgcgctagtgacactcttcgggcatggcaataatgctgggctcggattttcaactttaacaatcgtggttaacgcttcgtctttttccatcgtcgcggccaggacatttgctggcaaatcaagataaactccgccagggcgaccgcttacagagacccggatagcgcgtgccaatgcaatgccaagatcctgcggctgattaacgcgaaatgctgctttggcatacggttttgccgcattcatttggtccagctcttcataatcaccttgctgtaggtcgacgatcgcgcggtcgctggagccgctaatcatgatcatcggaaaaccatttaccgttgcgttggccaatgcggtcaaaccattgaggaatcctggcgcagaaactgtcaggcagatccccggtttttgggtaagaaaaccgcttgccgcagcggcatagcctgcgctctgctcatgacgaaaaccaatataacgaatgccttccgcctgggcatggcgtgccatatccgtcacaggaatacctacaacaccataaatagtgtcaatattattctgttttaatgcttcaacgatgatatgcataccatctgtcatttgaagttgatcactcatgattaataacctcgaaatttttataaattgggagccagaagcccccgttaatatcagatggcgtggttttgcttcattgcagcaatttcatcgtcgctataacccagctcctgcaatacagcagcggtatgttcacctaatagcggcgcagctttaatatccggcgtaaaggcagagaatttcattggacaaccaacggtcagatattttccacgcaacggttgttccacttcaacaacactgccactttggcgcaaagagggatcaagactaatttctttcatacttaaaaccggtgcacaaggaatatcaaactgagtcaaataggccaccgcttcatgtttatcaatagtgacagtgtatttttcgatttcagcaaaaatatcgaaaatatgtggctgtcgtgcatgggctgtactgtatgccggatcggtaatccattctggtttgccgatggctttacaggtgttttcccagttttgctcctgaatagtgaaataaatataggcgttaggatcggtttcccagcctttacatttcaggatccagccaggctgaccgccaccacctgcattaccaccgcggggaactgcatcaccaaatgtaccattcggatactgcgggtattcttccagatgacccaatttatcgagacgctgctggtcacgtaatttcacgcggcaaaggttcaatacggcatcctgcatactcatggtgactcgttgcccacgccccgttttttcgcgatgcagcaaagcagcaagtaaaccgatcagcaaatgcattccggtgttgctgtcacccaacgctgcagcgcttaccagcggcggaccatcccaaaaacccgtagtggatgccgcgccacccgctgcctgagcaacgttttcataggcttttacattcacataagggctacactcatcaaaccctttgatgctaccaaaaatcagacgtggattgatttcttgaatatgctcccaggtgaagcccatgtgatcaatggcccctggatgaaagttctcgactaagatatcagcttcgcggatcagcttttccattacctctttgccttccgctgttttggtatttaactcaatagaacgtttgttactgttaagcatggtgaagtaaagcgcatcgatatcaggaatatctcgcagctggtgacgcgttacgtcaccaacgccgggacgttcaattttaataacgtcagcgccaaaccaggccagcatttgagtacaagatgggccagattgcacaccggtgaaatcgagaactttaattccttgaagtggagtactcatagcaatacctattagttaattaaatatgtgttaatttagcgtttatttaaggcgtaatatcttctataaataacccgcaaaatatcgtcgtagctgcactcgatatttttaaaatcctgtatcaagtgctgaaaatcatttcatcgccacttccaattcctttctgcatggtaagtagtgaggacgaaaagaagaatatgataaatattgattcgtggtaatcagagagagtcgcgacatttgtgatgttattcttacaactgtaagaagcgccggtgatttacaagcaagggtatgattacgctttttaaagcgtaccataaaacataacataataaatgatttgtgatgacacgggattattgcggtttactttgaggaatataaaatgcgagtttatagcaccgcgagcgccaaataattttatgaccacaacctgtcgtattgtggtcataaaaaattgtcggctggagggagttaaatcctttacctcaatatactgcctgtcagcattagttcacaaacagtgcttcgctatcgacgatgattccatcttccgcacctttaagcgccaggtttgcctcgtagtattgctttttatcaagcagtttctgcgcatcagcaagtgcattacgagtctgtttaagtggcatcagatattggttttccattacgccaacaccggccaggcgaagctcttccattgcgccctttttatcccctttcgccattttttcattggcaatttttatcgcggcttctttttcgggagttgctacataactctcagaaattccgacagatgcattaatgacaatatattggtcatcattgagattggtctttttacctggcttagcgaactttgcccattcggtactgtcatcactcagcaaagcggaagcttcattggtcagttcttttgccttttctggatcgccatgaaacagagccaggcgcgctacctgcacgtcacgcatcgcatataaaccttgttcagagatacgctctgctgccgctgccgttttctgggtttgctgaacttgctgagtttgctgttgtgccgctaccggagcattatcagcagcccatacagtactagatgccagaattgctgtgaccatcgtggccataattaaacgtttcatacttacctcattctttaacagttttagaaaacgccgccatcatattgggtgagcatgaaatgagaaatcagagagcaacggtcattttgaaagggttatcttacagttgtagttattatcgcaagaagtattttagtcttacaattgtaggaatatgcttcctgtcgcagagaactattcttatataccacaaagagatgtcatttattatatcgatgtaaatactgattaattaaatgtaaatacagccataacatcgtaggttctcagtgaaccattttcaggataactttctatgaaagtaaacttaatacttttcagcttatttttattggtctctattatggcatgcaatgtttttgcattttccattagcggtggtggaagtgagaggagctataaagagactgaaaaaacaagtgcgatgacgaccacacactctacaaaacttcagccaagtcaggcgattttgtttaagatgagagaagatgcgccaccattaaacctcacagaagaaatgccgcccccttttccgacaaaggcgaattatcttattcatcctgtgcgataacgtctttcacatggcaggtgaacaatcatgtctgatgctgatgtgaacacctgcccaaatgagccatcctgacccattaccgcctgccataccccaccataaagcgaatcatcaagccacaagccggggcaagaaacataaatatccccgtcactagttcattaccgccagttaaccacatggtgaagtaataaatgagtgcagcgaggatcaccatgccgaagaaagaagagaccgcgcttaccacgttcagtacctgaccgatgtagccgcttacgcagacaatacacagggcgagaaacatccataaattaatcatagctcaacctcctgccgcgctaaaaaacctgtaacttcagtcactttaatagtaagacaatccttaacctctggcaatttttgctaagcatcaatgaaaacagcatgttaaatgcaagactgttgtgtacggaaaaatatttactttgcacgattaataatcagtagctgaaagcagtcagcgagtgataaagtacagataccgcattcatgctcctcgtggttatgtcctgactagtctttacactctttacaggaaccattgtcgtacatgatggcccaaccaattgagtgtaccgctgtcgacatggaatcttctgcgatacaacaattcgtatctacagaaggtaactatgtttccacaatgcaaattttcccgcgagtttctacatcctcgctactggctcacatggtttgggcttggtgtactctggctttgggtacagcttccttatcctgttctctgctttctcggcacgcgtattggcgcaatggcgcgaccattcctgaaacgtcgtgaatctatcgcccgtaaaaacctggaactttgtttcccgcagcattctgcggaagaacgcgagaagatgattgccgaaaactttcgtagtctcggcatggcgctggtagaaaccggcatggcatggttctggcccgacagtcgcgtacgtaaatggtttgatgttgaagggttggataaccttaaacgcgcacaaatgcaaaatcgcggcgtaatggttgtcggcgtccattttatgagcctggaactgggcggccgcgtgatgggactgtgccaaccaatgatggctacctatcgtccacataataatcagctgatggaatgggtgcagacccgtgggcgcatgcgctctaacaaagcgatgatcggcagaaataatctgcgcggcattgtcggtgcactgaagaaaggtgaagcggtatggtttgctcccgatcaggattatggtcgtaaaggcagctccttcgcgccgttctttgcggtggaaaatgtcgccacaaccaatggcacctatgttctctcccgtctctctggcgcagccatgttgaccgtaacgatggtaagaaaagcggattacagcggatatcgtttgttcatcaccccagagatggaaggctacccgacagatgaaaatcaagccgctgcctatatgaacaagattatcgagaaagagatcatgcgcgcaccggagcagtacctctggatccaccgtcgctttaaaacgcgcccggtgggagaaagcagcttgtacatttaacaaactgctcttactctttccctcctcaaatcggccataataacctcatggtttttatggcttttttcttaaggttttttccttcgctgaatatctaattattaccgtcagaaattaaactgtcgccgatatgagacacttgtaagttactaaaagtaaataagaaaatgcctcttgtctcgtttcagttttaggcgtacattagcgccgtctcgagcagtttagctcagaattctggggtgatgcccacggtaaaatacagggcttttaaggtcgctttgcccggtgtcaactcactgtatcaggtgtaatgaagtcattcaggcgtaacagtaattacgcggagagatgtaaagtgaaatatttctttatgggcatttcttttatggtcatcgtttgggccggtacttttgccctgatgatctaaaagcaaactgtgcaatgaaaaacaggagccatcaggctcctgtttgcatttctgacgacggtgtttattccgcgttttcgtgaatatgtttgctgctggcgggtagtaaaccgtcggcacggaacatcgctttaatccctctgatggcctgacgaatacggtcgcggttttcaatcagtgcaaagcgaacatgcgtatcaccatagtcgccaaagccaatccccgggctgacacaaaccttcgcttcgttaaggagcttcttggcaaattccaggcttcccatggccgcatatggttccgggattttcgcccagacatacatgctagccttcggcatttcaaccatccagcccgcttcatgcagccctttaaccaatacatcacggcggcgtttgtactgttcggcaatgtcgcgcacgcactgttgatcgccctccagcgccgcaatcgccgccacctgcaacggcgtaaaggtgccgtaatcgtgatagcttttaatacgagccagggcgctgaccagcgttttgttgccaaccataaagccgatacgccagcccgccatgttgtagcttttgctcagcgtaaagaactcgactgccacatcgcgtgcacccggtacctgcataatactcggcgctttccagccatcgtagacgatatcggcataggccaggtcatggaccaccagcacatcgtagcgtttcgccagcgccactactttttcgaagaactccagttccacgcattgcgcggttgggttactcgggaagccgaggatcatcatcttcggtttcggataactttcacgaatggctcgctccagttcgttgaagaaatcgacaccttccaccagcggcacactgcgtacctgcgccccggcaatcaccgcgccataaatatggatcgggtaacttggattcggcaccagcaccgtgtcaccatgatccagcgtcgccagcatcagatgcgccaggccctctttgctaccaatagtgacgatggcttcactttccgggtcgatttcaacgtcgtagcgatcctgataccagcgggaaatggcgcgacgtaaccgcggaatgccgcgactagtggagtaaccatgcgtgtccgggcgctgggccacagtacataatttttcgacgatatgcggcggagtcgcaccgtccgggttacccatgctgaaatcgataatatcttcgccgcgccgacgcgcagccattttcagttcagcggtgatgttaaaaacgtagggcgggagacgatcaatgcgcgtaaagcgacgttcagggcgagtgtcagccataatttcctcagattaacgttagcgcccggaccgtccgagcgacgctgccacgatggtggctgttttgaaaatagcctgattaatttctgtctgtccagtgttttagaacattttattaatgacgttaaatgaggaactctgctttaaaaacaggaaatttatctgcgctaacaagaaaattaccactcattctattaacataataatttcaataaatttactaaccagaagtgcattatcaagagatgcattgctaatacaccatttatctatcaatccccttttaaaattgtggtttttcctcaaaaacggcctgctggtcatcagccttcaggttacctatcatagaggtttaatccttattcagagtcacccgtgcacgaaatattcaacatgctgctggcggtcttcgatcgggcagcgttaatgcttatctgcctgttctttctcatccgtatccgcctgtttcgcgaactgttgcacaagagcgcgcactccccaaaagaattgctcgccgttaccgccattttcagcctgttcgccctgttcagcacctggtccggcgttcccgtagaaggcagcctggtgaacgtacgtattatcgcggtgatgtccggcgggattctgtttggcccgtgggtaggcatcattaccggcgtgattgcgggtattcaccggtatttaattgatatcggcggcgtgacggcgatcccctgctttatcaccagcattctggcgggttgtataagcggctggatcaacctgaaaatccccaaagcacagcgctggcgcgtcggtattctcggcggcatgttgtgtgagacgttgaccatgattctggtaattgtctgggcaccaactaccgcgttggggatcgatatcgtctctaaaatcggcattccaatgatcctcggtagcgtctgtatcggctttattgtgcttctggtgcaaagcgttgagggcgaaaaagaggccagcgccgcgcggcaggccaagctggcgctggatatcgccaacaaaacgctaccgctgtttcgccatgtcaatagcgagagtttacgcaaggtctgcgaaattatccgcgatgacattcacgccgatgcggtggcgattactaataccgatcatgtgctggcctatgttggcgtgggtgaacataactatcagaatggcgatgacttcattagcccgactacccgtcaggcgatgaattacggaaaaatcatcattaaaaacaatgatgaagcccaccgcacaccagagattcattccatgctggtgatcccattgtgggagaaaggggtcgtgaccggaacgctgaaaatttactactgccacgcgcatcagatcaccagcagtttacaggaaatggcggtcggtctgagccaaatcatctccacgcaactggaggttagtcgcgccgagcagctacgtgaaatggcaaataaggcagagcttcgcgccctgcaaagcaaaattaatccccattttctgtttaacgctctgaacgctattagtagcagtatccgtctgaatccggataccgctcgccagttgatctttaatctgagccgttatctgcgctataacattgaattaaaagacgatgagcaaatcgatatcaaaaaagagctgtatcaaattaaagactatattgccattgagcaggcccgctttggtgacaagctgacggttatctatgatattgatgaagaggtgaattgctgcattcccagcctgctgatccagccgttggtggagaacgccattgtccacggtattcagccttgcaaaggtaaaggcgttgtcaccatcagcgttgcagagtgcggaaatcgggtacgcattgcggtgcgagataccgggcacggcatcgatccaaaggtgattgagcgggtcgaagcgaatgaaatgccgggcaataaaattggcctgctgaatgtccatcatcgcgtgaagttattgtatggcgaggggctgcatatccgccgcctggagccggggacggaaattgcgttttacattcctaaccaacgcaccccagtcgccagtcaggctacgttattgctttgagccggagtgatattgtgaaagtcatcattgttgaagacgaattcctggcacaacaggaactgagctggctaattaaagagcacagccagatggagattgtcggcacctttgacgacggtctggacgtgttgaagtttttgcagcataaccgcgtcgacgccatttttctggatatcaatattccgagcctggatggcgtgttgctggcgcaaaacatcagccagttcgcccataaaccgtttattgtgttcatcaccgcgtggaaagaacatgcggtagaagcgtttgaactggaggcgtttgactacattctcaaaccgtatcaggagagtcgtattaccgggatgctgcaaaaactggaagcggcctggcaacaacagcagaccagcagtacgcctgccgcgacggtaacgcgtgagaatgacaccattaatctggtgaaagatgagcgaataatcgtcacgccaattaacgatatctattacgccgaagcgcacgagaaaatgacctttgtctatacgcggcgtgaatcctacgtaatgccgatgaacattaccgaattttgcagcaaactgccgccgagccattttttccgctgccatcgcagtttttgtgtcaatctgaacaaaatacgcgaaatcgaaccgtggtttaataacacctacattctgcgactgaaagatctggattttgaagtgccggtcagccgcagcaaagtgaaagaatttcgccagttaatgcatctttaatcgggaactttcatgaaagcaccaggcttgcccgccgatcaacaatttttcgccgatctgttcagcggcctggtgcttaacccgcaactactggggcgcgtctggtttgccagccagcctgccagcttgccggtgggcagtttatgtattgattttccccgtctggatatcgtgctgcgcggcgaatacggcaatctgctggaagcaaagcagcaacgtttggtggaaggagaaatgctgtttattccggcgcgcgcggctaatttaccggtcaacaacaaaccggtgatgctgttaagcctggtgttcgctccgacctggcttgggttaagcttttacgatagccgcaccacgagcttgttgcatcctgctcgccagatccagcttcccagcctgcaacgcggtgaaggtgaagcgatgcttaccgccctcacccatcttagccgtagcccgctggagcaaaatatcattcagccgctggtgttaagtttgctgcatctttgccgtagcgtggtgaatatgccgccgggcaatagccagccgcgcggcgattttctctatcacagcatttgtaactgggttcaggataattatgcccagccgctcacccgcgagagcgtggcgcagttttttaatatcacgcccaatcatctgagtaaactgtttgctcagcatggaacgatgcgttttatcgagtatgtgcgttgggtgcgaatggcgaaggcgaggatgattttgcagaaatatcatctgagtattcatgaagtggcacagcgttgcggttttccggatagcgactatttttgtcgcgttttccggcgtcagtttggtctgacgccgggagagtacagcgcccgttttcagggctaacgtcagaaggttaattctgtttccagcagcgtcaggatactttgtgcatcttgcgcggcaaacaagctctggcggaagtttttattcaccagtttacgcgccagctggctgaagactttcacatgattcatcccttcgttagcacccagcgtcagcatgatcaccagttcgacttcgcccatttcactctgccagccaatcggtttcgccagccgggcaatgctgatactggaatgacggatccactgagatttggtgtgcgggatcgctacgccaaaaccaacgccggtggtaacaatctcttcccgctgccagacatcttcttccagctcaaacggatgttcagtgcgcccgttaacgccgaggttgccgcacaggaactggatcgcctgctctttattgctaaaatcctgatcaacaaagatattctccagcgccagcagtgggcgaacgtcttcttccggcgtaaaggcggtgagtaacgcttcaatttcctgcgcactgcggcattcacatgcctgacgcgccagttcccgacacgcctcgctatccagttgacgaagctggcttttcaccgccggaatacgcgggctactcatactcagctcatccaggcccagcccaagcagtagcggcagataacggctttcaccgcccagttcaccgcaaatgcctacccatttgccccgctgatgcgcagtggtaactatttgctgcaacatgcgcaggaagcttggcgtaatcgggttatatagcgggcttacgcgcgggttattacgatcgaccgcatacagatactgggtcatatcgttggagccgatactgaagaaatcgacctcatcgcagaagtggtcgatgatgtagcacacgctcggaacttccaccatgatcccaagcgtaatcgtctctgcatgacgcaggccatcgcgcttaagctcaacgatcgctttttggatctcgcctttcacccataagatctgatcgaggctgtgaaccatcgggatcatcaactgggcgttgccgaaactggcggcgcgcaaaatggcccgcagttgagtgcggaacaggccagcaaattccgggtaaatacgtaccgcgcgatagccgaggaacgggttctcttcctggggaatattcagataaggaatgcttttatcgccgccgatgtccatcgtgcggaagataatcggcttgtcgcccgccgccagtagcacctgctggtaggcttcaaattgctcctgctcgtccggcgcgctgtcgcgatccatatagagcatttcggtacggaacagcccgacaccttccgcgccgttggcaaacgcgcctggcgcttccagagcggtgccgatattcgccgcaatatcaatacgcttgttatcacgggaataggccagctgcgcggcagcctgcgcctgttgtttttggcgtttatccgccagcgtctgcgcgacctgataataaccgctcaccgcgtcattcgggttaatcgccagcacgccgcactgggcgtcaagcactgcaggttgcccggcataacgggcaatcgcatccagcggcaagccactcagtaccgggatcgcgctggcacgggccagaatcagtgtatggctggtgcgcccggttttctccagaatcatgcccgcaagatttttcaaatcaaggctcaaaaactggcttggggttaaatcttcagccaccagaatggtcggtttttcaagcaccagcttgttgcgcggcttcagttccggccaggtgatatgcagcaactgttcgctgatatcgcgaatgtcgctaacacgttcgcgcagataatcgctggcagaggcagaaagtttggcgcaaacctgctccatattgctgatgatcgccgcccccagcccctgatgctgttctgtcatcaggcgacggatattgcctgcaaattcatcatcctgaatcaggctcaaatgggcgctgaggatagttttgctttcgccgtcacgctcacgcaattgctggttcagttgctcggcaagcgttgccaggctgtgctccagccgggtggaatcttgcgcactggcggggattgcccgataactgtcgaggctgtcgctttgtaacagggtcagcgtacccacgccgacgccgcttgccagcacattgccgtacagtaaatccgggttaaggcggcttaaactacgcggcagcggatgcgccgtcagttctgcctgcgtaggctgaacgctgtcgctgtcgataaagcgcacctggatgtactcttccagcacgcgccgcgcctgctcttcatcgctgccgctaatgttcaggctgcaactgtcattaaatagggtgccggtgccaatcagcgccaggctgcttttcgcatctgcctttgcgttctggcgatggttaataaaagtgatttcgctttgccactggctgcactgttctttaagttcccacgccggacgagcatgtagaccgttaggcaaaggacagagaaattgaatcgttaacataaccgctccgggttaatcaggagatcatctgaaatccgtcagttgaacaaccgtctcacgcgtaagacgttgaataagggcagataaaagttgctgcatctgcaaaatgtcgcggcaatcggcaatgcttgcggcgcaatgtccatggcgggttgctggccccatcaccactgtgggcacgccggtgccggttaagtgcaccgccccgccgtccgtgccgccgttgctgaacatatctgcctgcaacggcacgccaatttctgccgccacggtttcgacccaggcggtaagttttggcggcgcaatcaggctcttgtcgcttaacaccagcatcggcccgttaccaatctggcgatggttagccgcgccataatcaaagtttttcgcccagcaggcggtatcaagcacaatggcgacgtccgggctcaccgcgcgggtggcagtttgcccgccgcgtaatcccacctcttcgctggaacttgccaccagccacacttccgcaggtagttcggcgtcgtgcagttcgcgcagtaacgtcaccagcagatagcaaccgaggcggtcatcaaaggctttccccatcactcgctggtgagggagaacctgaaaagtggtatcaaacgtgacgcgatcgccgggacgaattcccgcctgcatcacttcgtcataggagcgcgcaccaatgtccacgcgcatggcgctgacgtcattcccctgccggtcgccgtcaagcaggcctggaattttgcactcttcacgggtggtgatgcgcaccggctgcagctggcgggcagccatgcgtacgttgccaaccggcagcacatcaatcgccccttcgcgggagatgctgcgcaccataaatcccacttcgtccatatgcgcacagatcatcaccttcggacctgtgctttcattcaggcggatcagcacgcttcccagaccatcaaatcgcacttctttttgcaggcgatccgcttcttccagcaggatctgccgcacttcctgttcgctggaggcgatcgcatctgcctcgctcaacgcttttaataggcttaaatccattatgcctctcccgtgagcaacactgttttcggcatggcgtagagcacttctgcgccttgcggggtaaccagcacaacatcttcgatgcgcacgcccccttgccctggcaaataaatccccggctccacggtcagtaacatgcctggctgtagcgtcgtggtgtcccgcggactaaaacgcggatcttcatgaacttcaatgccgatagcgtgaccggtgttatgaccgaaatagtcgccataacctgcttctgtaatgacccggcgcgcggcatcgtcaacctgctggcagcgcacgccggggcgaatcgcggagattgctgcgagctgtgcctgcaggacaatttgatagacgttaaacagcaggtgagattcggcgctcaccccttcgccattcaccagcaaggtgcgcgtcatatcagagcagtagccctgatacagcgcaccgaaatcgagagtgacaaactcgcccgctgcaacaatcttgtcgctggctttgccgtgcggcagcgccccacgccagccactggcgacaatggtgtcaaaagaggctttttctgcgccctgctggcgcataaaccactccagttcagcggctatctcgcgctcgctcatccccgcctgaataaagcggcgaatatgctctgcaccgcgatcagcaatcccacaggcgaggcggattttctccacctcctctggcgttttgatttgccgcagcacatccggcgtggcgctaaccagtttcgcattgagttcagactgccagcggtgcgcggtttcccaactcacctgctggccctcaaaaccgagcgtttgcaactgttcatcggcaatgatttgattgacgatagtggtaagcgtgttcgtcgcgtcaagcaaatgcagctggtagccttgcgcacgggcttccacctcaacgtaatagcggctatccaccagaatgtgcgcactttcacggctaatcaccacataaccacttccggtggagatccccagatgcggctgtttgttctgccgactggagagaagcactgcatccagttgttgcgccttaagccagtcgcgcaggctagcgagtaatgtcatctggattttccttcttacaggctatcgattaacaatttgcctttacggaacatcatcagacgcaggaacaccaccatcagcgcagttatgactgcccccagcgcgatccccgccatatagacgcccaggttagtgaccagcggccatgcccagatagcggactccgggaaccattgcactgcgcccagccagacagcggcggtactgccgacaatagcgccgaccatatagctcggaatggcggtgatagggctttccagcgcaaacggaatcgcaccctcactgatccccataaacgccaggaacatggcggtcttaccctgcggataaagttgagcgttgaacaggcgtttgccggttaaacgacggtcgataatggtcgccagccccagaccaatcggcggaataacgatagcgatagaacgagcggtgaccggtaatacgtggtcagtggtaaagctgaaggcaacaaaacctgcggctttgttgatcgggccaccaaggtcgattgctgtcgccgcggcgatccccattgcgtacatcagcgcgcccttctcacctgcggcagtcagcacagtacggataccgccgttgatccagccaccaaagggggtgatgacgtagtacatcgccagcatgacaaaaatggcggaaagaatcgggagcaaaaatgtggttttgaacgctaacaggaaatccggtaactggattttctggttcatccacttcacaaggtaaccggcaacgatagaaataatcagcgcaccaatgaaggtggacggcaccgggctagaggtcgcccattgcatagtgctgggatcgaagttcagcagttgcgtcggctgggtagacatcaacccgccgataaaaccagccgggaacgccagtttgccaccgatagagttcgccacaaaagcagcaaacatcggaatggcaaaaccaaacaacacgccgccgaaggactggctcagccaggcaaatttaagtaaggagaggtcgaaaccggagaatttcccgctattaagagcatccatgatgccgatctcagcaggaattttaagccagctataagcaatcagctggctgaaagcgaggatcacaccgcccataattaaggtcggcaccatgcgactaatcccactcatcacatgctgcgggagttcaccccagaagctggttttagaggcctgcggattcttaactgccgctgccgcaccggatgcgccaggcacaacggttgcactgcgttttttaatggccataacaattatccctgtcgaatattactgttgttcagaggcaatcatctcttcgatttctttgatgatgcccgcagcgtttttaattgcgtcctgcaaagtgatttcataaacgtcgcgactttcgaaacgttcgttatcttccggggtaactgccacggagtggatgatgatggtcgcttcggcgatatcctgcgccgtcaggcgattctggataccgtccgcgccctgggtttcaattttcacttcataaccggcttctaccgccgcttcttccagcgcctgagcggccataaaggtgtgagccaggcccatcgggcaggcacataaggcaatcagtttcttactcatcgttaattcctcgttcagtgatagttgacgagtgaaattatgaacgtgcaaaacaaatcgccgttaccagacaaataatgcatttactggagaattaatcccgctgtacggaagtgtgacgcaggtcgaccttgtgaggggacacaaagaaaaattgaataaactgtatgatttaaaagattatcgggagagttacctcccgatataaaaggaaggatttacagaatgtgacctaaggtctggcgtaaatgtgcaccggaaccgagaaggcccggattgtcatggacgatgagatacaccggaatatcatggacatattctttaaagcgccctttatcttcaaatgcggcacggaaaccggaggctttgaagaactcaaggaagcgcggcacgataccgcccgcaataaacacgccgccaaatgtcccgagattgagcgccagattgccgccaaaacggcccataatgacgcaaaacaggctcaatgcgcggcggcaatcggtgcagctgtcagccagcgcgcgttcggtaatatcttttggcttgagattttctggcaggcggttgtcagctttcacaattgcgcgatacaaattcaccagcccagggccagaaagcacgcgctccgcgctaacatgaccaatttccgcacgcaatatttcgaggataatggcctcttcttcactattcggcgcaaaatcaacgtgaccgccttcgcctggcaagcttacccaacgcttatcgacatggaccagatgcgcaaccccaagccccgttccggcaccgtaaaccgcaataggcttaccttcgaccggttctgcgccaccaaactgaatcagatgctcttttttcagcatcgggatcgccatgcttacagcggtaaaatcgttaataatttccagatggctaaaaccgagattctttttcatttcggcaatactgaacgcccaggtatggttggtcatcgccacccagtcaccggtaattgggcaagcgatggcaatacagccgtctttcacctcgaccttatgttcttcaagataaacgcgaatgaccgcttcgaggctggggtaatcaagcccactataggtcttagcctggctgatttcaccactggcaatatcacacagagcaagacgtgcgttggtgccgcccacatcaccgactaatgcatactttgtcattcttcaactgctccgctaaagtcaaaataattctttctcacactgtaaatacctgggggcataacaacaacgccggaaaggcaggctccctgtaaatatcgatctgggtcacacaattactttatcgtttcagcaccaattgcagcgatgcctttttgcaagctgggcaaactaagtatctgaccccgcataaggaatagaacacaggcggcactaacccggacgtagactgtattacaaaagcggcaaaaagcagagacaaaaaacccccgctttgcagcgagggttggaaatttggtggagctaagcgggatcgaaccgctgacctcttgcatgccatgcaagcgctctcccagctgagctatagccccacgatgcgtttacgtaccaagtttgctgggtgcaaaatttggtggagctaagcgggatcgaaccgctgacctcttgcatgccatgcaagcgctctcccagctgagctatagccccgtcacgtaaagcttgtcgagttgacgggcggcatcatatgaattccgcccgaatgtgtcaacggcaaattgcaacgtgtagtttcaatcgctgaaaaatcaggcaaatgaacaattttggaaaaccgctcgcattcagtagttattcatgtcacggtttcctgtaaagtggtgttataaaatgaactactaatagacccacatacattcagggaattgttatgttcaaggagaggatgacaccagatgaacttgccagactgaccggctatagccgccagaccattaataaatgggtacgcaaggaaggctggacaacgagtccaaaacctggcgtccagggtggcaaagcccgactggttcacgtcaatgaacaggttcgtgaatatattcgcaatgctgaacgtccagaaggtcagggagaagcgcctgccctttctggtgatgcgccgcttgaagtattgctggtgacactggcgaaagagatgacgccagttgaacaaaaacagtttacatccttgcttctgcgggaagggattatcggattgttacaacgcttagggattcgcgatagcaaataatatgaaaagattacgcaataaaatgaccaccgaagaactggctgaatgcctcggtgtggctaaacaaactgttaaccgttggatcagagaaaaaggctggaaaacggaaaaatttcccggcgtgaaaggcggtcgtgccagacttattctggtcgatacgcaagtttgcgagtttattcagaacacgccagccttccataacacaccaatgttgatggaagctgaagagagaattgctgaatacgctcctggagcacgcgccccggcgtatcgacaaatcatcaacgcgatagataatatgacagacattgagcaggaaaaagtcgcgcaatttttgagtcgtgaaggaattcgcaatttcctcgcccgtctcgatattgacgaaagtgcataaataaaaaacggcaggatattatctcctgccgtttatctttttacacgctaattactgctgattttcgcgttcagcaataaaatccagcgctttgttgatacgctcgatactgcgggtcttaccaattgcgtgaacggtaacatccagtgctggagactgccccgcaccggttacggcgacacgcagcggcataccaactttacccatacccacttccagctcatccgccgtcgcctgaatagcgtgatgaacgttttcagcggtccagtcagtaatcgcggccagtttgtcacgaaccacttccagcggctgacgcgctaccggacgcagatgttttttcgcggcgtcggcatcgaactcagcaaaatcttcgtagaaataacggcagctctgtgccatctctttcagcgtcttgcagcgttcgcccagcagtttcaccagatcagccagctgcgggccgttacgggtatcgatattttcctgctcaatgtgccactgtaagtgagtagcaacatactccggcggcagcgcgttaatgtagtgatggttcagccacagcagcttgtcggtgttgaacgcactggcagatttgctgacggcattcaaagtgaagtatttgatcatctcttcacgagtgaagatttcctgatcgccgtgggaccagcccagacgcaccagatagttcagcagtgcttctggcaaataaccgtcatcacgatactgcattacgctgactgccccgtgacgtttggacagttttttaccgtcatcgccattgatcatagaaacgtgcgcgtaaaccggcaccggcgctttcagggccttaagaatgttgatctggcgtggcgtgttgttgatatggtcttcgccacggataacgtgggtgatttccatatcccagtcatcgacaaccacacagaagttataggttggggaaccatcggtacggcggataataagatcgtccagttcctggttgctgaactcgatcggaccacggatctgatcgtcaaaaacaacagaaccttcctgcgggttagcaaaacgtacaacacacggttcatcatcagcatgatgctcatggctgtggcggcagcgaccgtcataacgcggcttctcacctttcgccatttgctcttcgcgcagcgcttccaggcgctctttagagcaatagcatttataagcagtgccctcttccagcatctgatcgatcaccgcgttgtagcgatcaaaacgtttggtctggtagtacggaccttcatcccactccaggctcagccagttcatgccatccataatggcttcgatagcttccggcgtggaacgctcaagatcggtgtcttcaatacgcagcacgaactcaccgccgtggttacgtgcaaaaagccaggagtaaagagcagtacgcgcgccgccaacgtgcagatagcctgttgggcttggcgcgaagcgagttttgattttcatgaaatggccttacgtttagaaagatgccgacaaccggcaaatcctggaaaaattaagtgggcgatattctatcactcccgcctgattcctcaatgtagttcgggtttctaccttacgcattattgttttcgttgacaaattgcgcaacacggtctgttttgcgatcatcttgcttaaatttacgacgaacgaacaatttctttagaaaatgcgttgactcattttgaactctccctataatgcgactccacacagcgggggtgattagctcagctgggagagcacctcccttacaaggagggggtcggcggttcgatcccgtcatcacccaccaactactttatgtagtctccgccgtgtagcaagaaattgagaagtgggtgattagctcagctgggagagcacctcccttacaaggagggggtcggcggttcgatcccgtcatcacccaccactttctcgccagctaaatttcttgtaaaaatgtgaagtaccgaagtgggtgattagctcagctgggagagcacctcccttacaaggagggggtcggcggttcgatcccgtcatcacccaccacttcgggtcgttagctcagttggtagagcagttgacttttaatcaattggtcgcaggttcgaatcctgcacgacccaccaatgtaaaaaagcgccctaaaggcgcttttttactatctgcgatactcaaagattcgaacctgcagcaggtttgagttgagcgcagcgaaacaacggagccgctcgtgctggcgacggcccgaagggcgagcgaagcgagtcatcctgcacgacccaccaatgtaaaaaagcgccctaaaggcgcttttttgctatctgcgatttgcgaaattgcctgatgcgcttcacttagcagactactatttccggcaattcctgtctcctcacttactgtgtcaatgcagccaacagcttaaccatcgcgggcgtcacctgctgtgtttcataaacaatatataaatctgcagggatgcgctgtttgagcggacggaaaatgacacctggccagttcatttgtgcgtagctgtccgctatcaatgtgataccaatgcccatactgaccatagcgagtaccgtttgcggttcattaacttcgcgaataacaaccggactaaatcccacctgctggcaaactcgctgcaaaaaatcccagtcagtgtaaacgggcggcattgtaacaaaatactcgtcacgtagcgcttccagcgggacggtggaaaaactactgagatgatgctcttcaggcatcgccaccagaaacgcgctttcatgcaaccgtaagctggtaaaaccagtcggtggttctgtcgccattcgccagatcccggcatcaagttcgcggcgttccagcaaggccatttgcatcgcgggcatcttttcgcgaaaaagaacgtcaacgttaggattttccctgaggaatcgccgcataaccgggcgcatccgtccccacattgccgttcccactacgccgagttcaatccgccctgcttctccccgacctatttgttcaatccgagccaatacattattagcattcaccagcaatcgacggctttcttccatcaagattttgcccgcgtgtgtcagtacgacgctgcggctatggcgaataaaaagctgcgtgccgagttgattttccagctctttaatatgaatgctgagcggaggctgagacatatttaaacgcgctgctgcgcggccaaaatgcaactcttccgctacggcaagaaaataacggagcaacttaagatctgttctgtatacgcgttccataattaagtgctccatataataaatacatcgtattaaattatcatggcataaagtatttcaccaccagatatccgacatacataaacacaatggataatatacccggtaatacatttggtacaggaataggcaagcgcacgattgtaaacaaagcaccaataccaaaaccaacgccggaagaaaataaaatatctttcactaattaacctttatcataaaagcagctctgaagagcagagccgcgaatccttttaatgagtcaccgctcgatgctttatcttttcagggtcatgattatatttaaacccaaagaaaaatatcactgcgagaaaaagagcatatcctgcaaacaccagccagatagtttgccagtcttttacgccatccacgctaaagtaatctactgccatgccactcagaatgctgccaacccatgcgccgacaccatttaccatggtcataaagagcccctgcgcgctggcacgaatgctggaatcaacttcctgttcgacaaatacgctaccagaaatattgaagaaatcgaatgcacagccataaacaatcatgctcagcagcagcaaaataaatccggttgtactcggatcgccataggcgaagaagccaaagcgcagcgtccaggccaccatactcatcagcatgacggttttaatgccaaatcgctttaaaaagaatgggatagtcagtataaagcccacttctgccatctgactaacactcagtaaaatggagggatatttcaccacaaaactgtcagcaaactccgggttacgggcgaaatcatgtaggaacggattaccaaaaacgttggtaatttgcagtaccgcacccagcatcatggcaaagaggaaaaagatggccatgcgtggatttttaaacagcacgaaggcatccagacccagcttgctggcaaggcttgtggtcgcttttttctccgcaaccggaatcttcggcaaagtcagcgcataagcgctcagcagcaaactcgcaccggacgcgatatacagctgcagactactcaattccagatgcagcaggcttactgcccacatcgcgacaatgaaccccaccgtaccaaaaacgcgaatgggcgggaaagcggtcaccgggtcaagccctgcctgggcaagacaggaataagagacgctgttgcttaacgcaatagtcggcataaacgccatcgcattgactaacatcacccaaaacatcatatccggatcagttacggatgccgcataaaaaagtacgcccgcacacaccaggtgacacagcatgtatgcacgttctgcgcgcagccatttgtctgcgatgatccccattataccaggcataataatcgcggcgatccctttggaactgtaaaccatgccaacattagcgccggtgaaatgaagagtattaatcatgtaagagccgagggtaaccagccagctcccccagataaaatattgcaaaaaggacattacctttaagcgcatcgcgatgctcataatcgtttccttgtcgcatcatttggcctcacccgcgaggccgtttcttattgtttttctcaggcaattttgcgcagaaagccacaaataaggttgatgaagttctgcttagagagctccgcagccgccagcgtttgcgcatgactcaatttcacatcgcttaaaccttccgccatattggtaatcgcagagaccgcaacgactttaaggtcgcaatggcgagcactaataacctcaggcaccacagacataccaacaacatccccaccaataatttgcatcatgcgaatttccgccgcagtctcgaaattcggccccggatagctgacgaacacgccctccgtcagagggaaaccctcctctttcgccactttttgtaacagtgcgcggtattccgcatcgtaggcatttgccagactgaagaagcgctctccaaaacgatcatcgttaagacccaccatcggcgtaccgggcatggtgttgatatgatctttcaatgcgaccaggctgcctgcccccacttccggacgcaggctgcctgccgcattggtgcagaacagtagctcgcagcccagcagcttaaaggtacgaattgcgtcagtcataatggtcattccacgaccttcgtagaaatgtccgcgacctttcatacataccaccggtacgccctggagatggcccagcactaactcccccgcatgaccatgtaccgtacttaccgggaagcccggcagcttttcgtaggaaattgcgacagcgttctcaatctgatcggccagcgcgccgagcccggaacctaaaataaaggccactcgtggcgtgaaatcaggtttataagtcttgataatatctatgcaaaacagcgggttatgagaaaattgaacctgagacatacatatcctttttctgtagggtggaatctaacgcctttttatagcgaggttgtcccggctcttaccaatacacttttctcacgcattcaatagcgattcgatatcgatggatttatatcttttttctattaatccacggtaaaaactgtattggcgatattaattcctttgcattaacaatatgtcgtttttagcaaaccactttattaagcaatctactaataacgatcggcatagggaattatgctatgaaaaaacatcttttaactctgacactttcctctatattagcgatacctgttgtatctcatgcagaatttaaaggcggttttgcagatatcggcgtgcattatctggactggaccagccggactaccgaaaaaagcagcaccaaaagtcacaaagatgattttggttatcttgaatttgaaggtggcgctaactttagttggggagaaatgtacgggttcttcgactgggaaaacttctataacggtcgccataataaaccaggtagcgagcagcgttatacctttaaaaataccaaccgtatttacctgggtgacaccggatttaatctctacttgcatgcgtatggcacctacggttctgcgaatcgcgtgaatttccacgacgatatgttcctgtacggtatcggctacaatttcaccggcagcggttggtggttcaaaccgttctttgctaagcgttatacagatcaaacctattacactggcgacaacggctatgtcgccggctgggttgcaggttacaactttatgctgggcagcgagaaattcactcttaccaactggaacgagtacgagtttgaccgtgacgctacctatgcagcgggtaatggcggtaaagaagggctgaatggcgcagttgcactgtggtggaatgcaacaagtcacattactacggggattcagtatcgatatgcggatgacaaactgggcgaagatttttaccaggatgcgataatctactccatcaaatttaacttctgattgattactgccggggctcccggcagtatgaattcactttatatctgatacaacggatccccttcccgcccagccattagcgcattgccctggtctcgtaccacgtcccataaagcttcagcggcggtggaaagactacggttcttcctgcgcaccagcatcaactggcgttcaacaaccggcgtaatgcgctttaccaccagtgggctaccttcaggcaatggtagcgccagtgcgggaagaatactgatgccgatgcctgcggctaccatcgggaacagcgtcgccggatgtccaatctcctgcacaatattcgcctgaataccattgcgcgccagcgctgcgtcaatcagcggtcggctgccactcgcgtaatcctgcaacaccaatttcgctccctgtaatgcctgccagggtacataatcttccacggccaaagcgctatcgcgatggcaaagcagaaagaaaggctcggaaagaatcgcttcacattgcagatcgcccactgggcctggatcgatgacgatgccaaaatcgacatctccctggcgaatactttccattacccactgctgcggacgatcgtgcaggacaaactgaatatctggatagcggcgatggctttcagcaatgcattgcggaataagatgcgcggaaatggtctggctggcagcgacccgaacttttccgctcagttgttgccccatacgcccggtatcgcgcaacgtgctgttcagttcatccagcagtcgctcaagacgcaaagccagctgctgccctgcatctgtaagcaccacttcacgcgtggttctgtccagcaggcgaacaccagtatgattttccagttccttcacactgtgactcactgcgctctggctcaggccgatacgctctcctgcacgactaaaacttttctcctgcgctactgtgacgaaaacctttaattgttttaaagaataattcatctgttttcttcatgaatggatgcaataaatcaattttatttctcaaactggaagaagcacaatagaaccatcgatcatctggagtctttatgaaactttttcgtatcctcgatcctttcaccttaaccctgatcacggtggtgttgctggcctctttctttccggccagaggcgatttcgtccccttctttgaaaatctgaccaccgcagctattgccctgctgttctttatgcacggcgcgaagttgagccgtgaggcgattattgctggcggtggtcactggcgactgcatttgtgggtaatgtgcagcaccttcgtgctgtttccgattctgggtgtactgtttgcctggtggaaaccggtaaatgtcgacccgatgctctactccggttttctctacttgtgcattctcccggctaccgtgcagtctgcaatcgccttcacgagtatggcgggcggtaacgtcgcggcagcggtttgttctgcgagcgcatccagcctgctggggattttccttagtccattgctggttggtctggtgatgaatgttcacggtgcagggggcagccttgagcaggtcggtaaaattatgctgcaactgctgctgccgtttgtgttggggcatctttcccggccgtggattggtgactgggtgagccgcaataaaaaatggattgcgaaaactgaccagacgtccattctgttggtggtttatacagcgttcagcgaagccgtcgttaatggtatctggcataaagttggctggggaagtttgctgtttatcgtggtggtcagctgcgttcttctggctatcgtgattgtagttaacgtctttatggcacgccgactgagcttcaataaggcagatgaaattactatcgtcttttgtggtagcaaaaagagtctggcaaatggcatcccgatggcaaacattctgttccccacaagcgtgatcggtatgatggtgctgcccctgatgattttccatcagatccaattgatggtctgtgcggtgctggcgcgtcgatacaaacgccagaccgaacagttacaggcgcagcaggaaagcagcgccgataaagcttaaagcggacgcttcaggggctggaccagttgcgtcagcccctcggttttaatcagcagcgtgatttgcattagctcaccgagcttccctgccgggaactcatctttgcgggcaaaccacagcagatactcctccggcaggtcgattaagcgacgccctttgtatttgccaaacggcattatcgtattggctatttcaatcagctgctctttttccatctcagctacccagcaaacgcagcatttccgcttcgtcgatgacttcaatgcccagttcctgcgccttcgccagtttagatcctgcagcttcacccgctatcaccagatcggttttcttgctcacgctgcccgcgactttcgcgcccagttcgaccagtcgagctttagcgtcatcacggctcatctggcttaagctgcccgtaagcaccacggttttaccagcaaacgggctgtcaatctcttccgcgttgataacgatcggcgcaggccagtgaacaccttccgccaacagctcgctgatgacattgcggttgctttcttcggcaaagaagttgtgaacgtgggatgcaacgacaatgccaacatcaggcaccttttgcagctcttcaatgctagcggcttccagcgcttccagcgtgccgaaatatgccgccagacctgctgcggtggcctcgccgacttcacggatgccaagtgcatagaggaagcgagcaaaggtggtttctttcgctttttccagcgcgttaaccacgttttgtgcgctttttggccccatacgctccagtccggtcagtttgcctgcggtgagtttgaacagatctgccggagtatggacatattctttttcaaccagctgatcgatgattttgtcgcccattccgtcaacatccatcgcacggcgggaaacaaagtgtttcaggctctctttacgctgcgcaccgcaaatcaggccaccggtacagcgggcaaccgcttcaccttccacacgctcaacgtcagaaccacataccggacaatgcgtcgggaatacaacctcacgggtatcttccgggcgttcagaaagcacgacgttaaccacctgcgggatcacgtcgccagcgcggcgaatcaccactttatcgccaatgcgtaaaccaagacgttcgatttcatccgcattgtgtaaggttgcgttactcaccagcacgcctgcaacatggacaggttccagacgcgcaacaggcgtaatcgcgccagtacgcccaacctgaaactcgacgtcacgcacaaaggtcatctgctcctgcgccgggaatttaaacgctaccgcccagcgcggggcacgcgcgacaaagccaagctgctcctgctgtgccagactgttgaccttaatcaccacgccgtcgatatcaaagcccagcgtcgggcggtcttcttccactttgtgatagaacgccagcacttcttccgcgctttcacaaagcgttacccgatcgctgaccggcaacccccactttttaaattgcagtaaacggccaagatgagtatccggcagctcgccaccttccagaacaccaacgccatagcagaaaaaagtgagcggtcgcttcgctgtaatacgcggatcaagctgacgcagactaccagctgccgcattacgtgggttagcaaacactttcccgcccgtgcgtcgcgcatcttcgttaatcttttcgaaccccgcctgcggcaggaacacttcaccacgcacttccagacgcgccgggatattctctccgtgcagcttcagcggaatggcgcgaatagtacgcacattagacgtgatatcttccccggtggtgccatcgccacgggtcgcggcactgactaaaacgccattttcatacagaatactgacggcaagaccatccagcttcagctcacagcaccaggtgactttctcgttgtttttcagacggtcctgcacacgtttgttgaaagcaagaaagctttcttcatcaaaaacgttatccagactcagcattggtacttcatggcgtatctggctgaaagccgccagcggcgcagcgcctacacgttgagtagggctatcaggcgtaatcagttctggatgtttggtttccagctcgcgcagttcgcgcatcagcctgtcgtattcagcgtcgggaatttccggcgcatccatcacatgataaagatattcatgatggcgaagcgtcgttcgcagttctgtcagttgttgttcgatactttccatatcgcaccatcaatgctaaaaacccccgacaagcgggggttcgaagaggagttaatttgccttaagtgtatcaggcgttggcgtctttgacttcgcggatgatgtcctggtactcgcgcaatttctgcggagtcatcatacggcgctgatcgtcaagcacgacaccgcccacttcatcggcaatatgctgcgcagattgcagcatcagcttgaagttctgcagctcgtcaccgtaagacggtacctgcataaagatagtgacacccggagtagtgaaatccttcatttcaggatcaaaggttcccggtttcaccatattcgccaggctgaataacgccgggccgctgccatccgggctaagatgacgatggtaaatattcatatcgccaaaaatgaagcccgcttgttgaatgctgttaagaagcagttcaccgtttagctcgctaccgtgatgcgccgcgacgttcatgataatcaccgcttctttgcgcttcggtttatccataactggagcaggttccgctacaggctcaggctgtggtgccgctacgggttctgcaggctggaaagcctgttgtgccggttgcggtgcactatgcacaggctgcggcgctggcgcgacctgtgggctaactggctgctgcaacggctgttcaggctgcggctgataggcaggctgctgcaccggctgcgctggatgcggagcatgttgcggcggtacctgcgcttcaggcggctgctggaccggttgacgcggctgcgcagacgcataaggcggttggtactggtgttgcgggctcggacgagcagcctcatgctcctgagcgttagccggggcatgattcacgcggtgaacacgaacctcaccaacgccctcatcatcttcgacatcctcgtcataagaatcgtcgtcacgtttactcttcattcgttttaatggccgatcgcggaacatagaagatcgttctttacggctggtccagaaaccatgtaccagtaaagcgattatggcgatcgcgccaacaatgattaatatcagacgcaaatcctgcatcattatattctctgttgttctaacaccttgccaccacggcaaacatttactcactaagagtatttgccgattacctcaagtgcaagtgcactattaactttcacagcacaaagatagatgaaatcgtgctttttgctgttttttcgaacatatcctaactgtccattgcgcaattacccggtaaaatacgcagaattttcctgggattggtcaaaaggagctcatcctgattatggttagtagtttcacatctgccccacgcagcggtttttactattttgcgcaaggctggaagctcgtcagccaacctgggattcggcgtttcgttattttaccgctgctggtcaatattttgttgatggggggcgcattctggtggctctttacacagctcgatgtctggatcccgactctcatgagttacgttccggactggctacaatggctgagttatctgttgtggcctctggctgtcatctctgtgctgttagtgtttggctatttcttctccacgattgctaactggattgccgctccgtttaacggtttattggctgaacaactggaagcacgattgactggcgctacaccgccagataccgggattttcggtatcatgaaagatgtgccgcgaatcatgaaacgcgaatggcaaaaatttgcctggtatctgccgcgcgcaattgtattactaattctttacttcatccctggtattgggcaaaccgtcgcgccggtactgtggttcctgtttagcgcctggatgttagccatccagtattgcgattaccccttcgataaccacaaagtgccgtttaaagagatgcgcaccgccctgcgcacacgcaaaatcaccaatatgcagtttggtgctttaaccagcctgtttacgatgatcccgctgcttaatctgttcatcatgcccgttgccgtttgtggcgcgacggcgatgtgggtcgattgctatcgcgataaacacgcgatgtggcggtaacaatctaccggttattttgtaaaccgtttgtgtgaaacaggggtggcttatgccgccccttattccatcttgcatgtcattatttcccttctgtatatagatatgctaaatccttacttccgcatattctctgagcgggtatgctacctgttgtatcccaatttcatacagttaaggacaggccatgagtaagatttttgaagataacagcctgactatcggtcacacgccgctggttcgcctgaatcgcatcggtaacggacgcattctggcgaaggtggaatctcgtaaccccagcttcagcgttaagtgccgtatcggtgccaacatgatttgggatgccgaaaagcgcggcgtgctgaaaccaggcgttgaactggttgaaccgaccagcggtaataccgggattgcactggcctatgtagctgccgctcgcggttacaaactcaccctgaccatgccagaaaccatgagtattgaacgccgcaagctgctgaaagcgttaggtgcaaacctggtgctgacggaaggtgctaaaggcatgaaaggcgcaatccaaaaagcagaagaaattgtcgccagcaatccagagaaatacctgctgctgcaacaattcagcaatccggcaaaccctgaaattcacgaaaagaccaccggtccggagatatgggaagataccgacggtcaggttgatgtatttattgctggcgttgggactggcggtacgctgactggcgtcagccgctacattaaaggcaccaaaggcaagaccgatcttatctctgtcgccgttgagccaaccgattctccagttatcgcccaggcgctggcaggtgaagagattaaacctggcccgcataaaattcagggtattggcgctggttttatcccggctaacctcgatctcaagctggtcgataaagtcattggcatcaccaatgaagaagcgatttctaccgcgcgtcgtctgatggaagaagaaggtattcttgcaggtatctcttctggagcagctgttgccgcggcgttgaaactacaagaagatgaaagctttaccaacaagaatattgtggttattctaccaagtagcggtgagcgttatttaagcaccgcattgtttgccgatctcttcactgagaaagaattgcaacagtaatgccagcttgttaaaaatgcgtaaaaaagcacctttttaggtgcttttttgtggcctgcttcaaactttcgcccctcctggcattgattcagcctgtcggaactggtatttaaccagactaattattttgatgcgcgaaattaatcgttacaggaaaagccaaagctgaatcgattttatgatttggttcaattcttcctttagcggcataatgtttaatgacgtacgaaacgtcagcggtcaacacccgccagcaatggactgtattgcgctcttcgtgcgtcgcgtctgttaaaaactggcgctaacaatacaggctaaagtcgaaccgccaggctagactttagttccacaacactaaacctataagttggggaaatacaatgttccagcaagaagttaccattaccgctccgaacggtctgcacacccgccctgctgcccagtttgtaaaagaagctaagggcttcacttctgaaattactgtgacttccaacggcaaaagcgccagcgcgaaaagcctgtttaaactgcagactctgggcctgactcaaggtaccgttgtgactatctccgcagaaggcgaagacgagcagaaagcggttgaacatctggttaaactgatggcggaactcgagtaatttcccgggttcttttaaaaatcagtcacaagtaaggtagggttatgattagtggcattttagcatccccgggtatcgctttcggtaaagctctgcttctgaaagaagacgaaattgtcattgaccggaaaaaaatttctgccgaccaggttgatcaggaagttgaacgttttctgagcggtcgtgccaaggcaagtgcccagctggaaacgatcaaaacgaaagctggtgaaacgttcggtgaagaaaaagaagccatctttgaagggcatattatgctgctcgaagatgaggagctggagcaggaaatcatagccctgattaaagataagcacatgacagctgacgcagctgctcatgaagttatcgaaggtcaggcttctgccctggaagagctggatgatgaatacctgaaagaacgtgcggctgacgtacgtgatatcggtaagcgcctgctgcgcaacatcctgggcctgaagattatcgacctgagcgccattcaggatgaagtcattctggttgccgctgacctgacgccgtccgaaaccgcacagctgaacctgaagaaggtgctgggtttcatcaccgacgcgggtggccgtacttcccacacctctatcatggcgcgttctctggaactacctgctatcgtgggtaccggtagcgtcacctctcaggtgaaaaatgacgactatctgattctggatgccgtaaataatcaggtttacgtcaatccaaccaacgaagttattgataaaatgcgcgctgttcaggagcaagtggcttctgaaaaagcagagcttgctaaactgaaagatctgccagctattacgctggacggtcaccaggtagaagtatgcgctaacattggtacggttcgtgacgttgaaggtgcagagcgtaacggcgctgaaggcgttggtctgtatcgtactgagttcctgttcatggaccgcgacgcactgcccactgaagaagaacagtttgctgcttacaaagcagtggctgaagcgtgtggcagccaagcggttatcgttcgtaccatggacatcggcggcgacaaagagctgccatacatgaacttcccgaaagaagagaacccgttcctcggctggcgcgctatccgtatcgcgatggatcgtagagagatcctgcgcgatcagctccgcgctatcctgcgtgccagcgctttcggtaaattgcgcattatgttcccgatgatcatctctgttgaagaagtgcgtgcactgcgcaaagagatcgaaatctacaaacaggaactgcgcgacgaaggtaaagcgtttgacgagagtattgaaatcggcgtaatggtggaaacaccggctgccgcaacaattgcacgtcatttagccaaagaagttgatttctttagtatcggcaccaatgatttaacgcagtacactctggcagttgaccgtggtaatgatatgattagtcacctttaccagccaatgagtccgtccgtgctgaacttgatcaagcaagttattgatgcttctcatgctgaaggcaaatggactggcatgtgtggtgagcttgctggcgatgaacgtgctacacttctgttgctggggatgggtctggacgaattctctatgagcgccatttctatcccgcgcattaagaagattatccgtaacacgaacttcgaagatgcgaaggtgttagcagagcaggctcttgctcaaccgacaacggacgagttaatgacgctggttaacaagttcattgaagaaaaaacaatctgctaatccacgagatgcggcccaatttactgcttaggagaagatcatgggtttgttcgataaactgaaatctctggtttccgacgacaagaaggataccggaactattgagatcattgctccgctctctggcgagatcgtcaatatcgaagacgtgccggatgtcgtttttgcggaaaaaatcgttggtgatggtattgctatcaaaccaacgggtaacaaaatggtcgcgccagtagacggcaccattggtaaaatctttgaaaccaaccacgcattctctatcgaatctgatagcggcgttgaactgttcgtccacttcggtatcgacaccgttgaactgaaaggcgaaggcttcaagcgtattgctgaagaaggtcagcgcgtgaaagttggcgatactgtcattgaatttgatctgccgctgctggaagagaaagccaagtctaccctgactccggttgttatctccaacatggacgaaatcaaagaactgatcaaactgtccggtagcgtaaccgtgggtgaaaccccggttatccgcatcaagaagtaattcttgccgcagtgaaaaatggcgcccatcggcgccatttttttatgcttccgccagcggcggcaaaatcaattcatcgctctcatgctgctgggtgtagcgcatcacttccagtacgcgcaaccccgctcggtgcactgcatcggttaacgccttccctttcagcaagccactgatgagctgagcacaaaacaggtcgccagtccctttcaggtcggtttttacccgactatgggaaatgacattcacgctgtcggcagtgaccaccacaacctgcatctcctgattttcttcattaccggaggcgctggtaaccaccacccattttaatgtgtcactaagcagactttttgcggcagcaatggcactgtcgagatcgcggcaatttttaccggtcaggatttccaactcaaagatattgggggtaattccctgcgccagcggcagtaaatattgtcgatacgcttcgggaaggtcaggtttgacataaattccgctatcaatatcgtcaatcaccggatcgaccatgatcaataggtcaggatggtctttgcgtagcgcagtcagccactcggcaaggattttgatttggcttgccgttcccatatagcccgtggttacagcacgaagttggcgcagcgcatcacgctcctgaagcgcacgcaaatagccgctaaaccattcgtccggaatcgcaccaccgtagaaagtgtcataatgcggcgtattgctcagcaataccgtcggcacggcaaagacattcaggccgttctgtttgatagcaggcacggcaatgctgttgcccacgctgccgtaaaccacctggctctgcacggcgacgatatccgcctgcagtgccctactcttatcgttaaacaacaacaaactactcatttaattttttctccttgccgatgatcctcatcgtaatccaaccgaaactttacctgattctggcagtcaaatcggctatcacaaaacaaggataaggtaattcaatgaagaaaatcatttgtctggtcattacactactaatgacactccccgtttacgcgaagttaactgcccatgaagaagcccgcatcaacgccatgctggagggattagcacagaaaaaggatttgatatttgtgcgcaacggtgatgaacatacctgctatgaagcggtttctcatctgcgtctgaagctcggcaatacccgtaaccgcattgacactgccgagcagtttattgataaggttgctagcagcagtagcattactgggaagccgtatattgtgaagatccccggtaagagcgatgagaacgcacagccttttttacatgcgttaattgcgcagacggataaaacggtgcctgcggaaggaaattaatccgctttgggaaggcatttacaggaggtaacatgaaaaaacgctttatttatcacgatgaaaaaagcaataaattttggtggatagattacgaaggggatagtttagctgtcaactatggcaaggtaggtagtattggtaaattccagacaaaagagttcgataatgaagaacagtgtctgaaagaagccagtaaattgattgccgcaaaaatgaagaaaggctatcaagaagatccaaagtttaacttcatggatcgctactattttgatgatgaagaaattgggttacatgttaaaacgagtcacccaaacttccagtgccattttactgatccactttatatgtgttgctgggatgaagaatctccttttggcagcgatgaaggtgctgatgctctaaacgttcttgaaaatagcctccgtaaagagccggatctggactgtgctgatttccctcaaatgttaattgaaactatgtggggtatgaaatacatcgctatggacagtattcttgaagaggatgttcgtgcgcaattactagtcgatgaaatgagcactatccagagcaatatgattacctacgcaactgcattcggtcagattaaagtcatgggtaaaatctcccataaacttaaaaagatgggactcaatgcactagcgcgtcatcagcttaccgcaaaaattcttcaatggggtgacggtcaggacagtccaatacttcaaaaaatgattgatgaccttacggcgtttcctcacgaaaattaaatactgcatttgtcggcagcaacaactgttaaaaaagtgcgctttgtttatgccggatgcggcgtaaacgccttatccggcctacaaaatcgtgctaattcaatatattgcagaaaccttgtaggcctgataagcgtagcgcatcaggcagttttgcgtttgtcatcagtctccgatgctattaatccttaaatccccgccccctggctaaaatgctcttccccaaacaccccggtagaaaggtagcgatcgccacgatcgcagatgatcgccaccaccaccgcgtcagggttagcttttgccacccgcagtgctccggcaaccgcgccgccggagctgacgccacagaatattccttcccgcaccgccagttcgcgcatggtgttttccgcatcgcgctgatgaatatccagcacctcatccaccagagaagcgttgaaaatccccggcagatattccgtaggccagcggcgaatgccgggaatgctgctgccctcttccggttgcaggccgacaatggtcaccggtttggattgttcgcgcataaagcgactgacgccggtgatagtgccggtcgtccccatgctggagacaaaatgagtgatgcgcccgccggtttgctgccagatttccggcccagtggtggtgtaatgcgcataagggttatcgggattattgaactgatcgagcagctttccttcgccacgattcgccatctccagcgccagatcgcgcgcaccttccatgccctgctctttggtgacaagaatcagttccgcaccataagcacgcatcgccgcacggcgttcctggctcatgttgtcgggcatcagcaatttcatgcgatagcctttcagcgcggcaatcattgccagcgcaatgccggtgttaccactggtggcttcgattaagacatcacccggtttaatttccccgcgcttttccgcctcgacgatcatgctaagtgccgcacgatctttcacgctacctgccgggttattgccttccagttttaaccacacttcactgccgttatccggccccattcgctgcaacttcaccagaggcgtattgcctattgtttgttctaatgtactcacgatctctatccatacgtggtgttgcctgatgcgacgcttgcgcgtcttatcaggtctacaggttacaaaccttgccattaaaaagcccggatcgcgggaagcgcctccgggcgtttaacattcactcaacctatcaggcgctttgtgcgagagcaagttcctcatcgcgggtttcgatacgctcgtcgccgttatacagccgcgcatgttgcagaccaacgaataaacgctcgccacgctgcggggcatcgtcgccatgcatcacgaccgtcagcggttcgttgtaccaccccagcggctgcaccactaattgggtgtagtgacctttcgggctggcttccagtacctgtaccggcagcgggctatcgaggctggtacggcggctgatatccacttcccaagggcgcaggaagagatccaccggcccctgatacgcaggtgtgtagcccagcggccagcgatgcgcgccaacatggaactgcccgccgcgaatggttccctgcaggcggttcacttcgcccataaattcgagcacaaaacggatcgccggttcgcgccatacctgatccggcgcgtcagcctgttcaatattgccctggctcatcacaactacacgatcagctacttcggtcgcttcttcctgatcgtgggtcacaaaaacgctggtgaattttagttcttcatggagttgacgcagccagcgacgcagctctttacgcacctgcgcatccagcgcgccaaacggttcatcaagcagcagaatttgcggttccacagccagcgcgcgcgccagcgccacgcgctgtttctggccgccggaaagctgcgccggataacgatccgccagatgggcaagctggaccatttccagcaattttgtcactttcgctttgatggctgcggcattcgggcgctcgcgacgcggcagcaccgtcaggccaaaagcgatattgtcgaacaccgtcatatggcggaacagcgcgtaatgctggaacacgaaaccgactttacgatcacgtgcgtgcaggcggctcacgtcggtgccgtggaagcgaatatgcccgctggtttgatgctccagcccggcgataatgcgcagcagcgtggttttcccggaaccggacggccccagcaacgcgaccatctgaccactaggaatatccagactgatatcgttcagcacctgggtgcgaccaaagctcttcttaatattggcaatctcaatgctcatgatgttcctcctgctgtgcgcgtttttcctgattctccaggcgccactgcaacatactttttaaaaacagggtgataatcgccatcagcgttaacagcgccgcagcggtaaaggagccgacggtgttgtagtcctgctccagcaattcaatctgtaacggcaggctcagggtttcgccgcgaatgctgccggaaaccacgctcaccgcgccaaactcgccaattgcgcgggcgttggtcaacaccacgccataaagcagcgcccagcggatgttcggtaatgtgacgcgacggaacatctgccagccggacgcgccaagcaaaatcgccgcttcgtcttcctggctgccctggcttaacatcaccggcaccagttcgcgcaccacaaacggacacgtcacgaagatggtgaccagcaccattcccggccaggagaacataatttgcaggttatgctcgtcgagccaaccgccgagcgggccgttagagccgtagaacagcaaatacaccagaccggcaaccaccgggcttacggcaaacggaatgtccagtagcgtcagcagtaactggcgtccagggaagttaaagcgcgtcaccagccaggccagcagaatgccgaacaccaggtttaccggtacggcaatcagcgcgatcatcaccgtcagccagatggcgtgcagcatgtccggatcggccagattctgtaaaaccggcatcagccccttgctgaatgcctgcacgaagatgtaaatcatcggcaccagcaggatgaacgcgctaaccagcatcccgatgccaatcagaaaccatttgccccagttaatcgggcgcgcgtcataacgcttcaattgggtaacttccgccattaatgacctaccacacgccgaccaaagcgactttgcagagtgttaatactgaacagcagcagcagagatgccgcgaggatcacgctagcaatcgcgctcgctgccgggtaatcaaactcctgtaagcgcacaaaaatcatcaggctcgtcacttccgtcttccacgcgatatttccggcgataaaaatcaccgcgccaaattcaccaagactacgggtaaagctcagcgccacgcccgccaccagcgccggagaaagctccggcagcaccactttgcagaaactctgccagcgcgttgcaccaagcgtttccgccgcttcttcatattccgggcctaactcttccagcaccggctgcacggtacgcaccacaaacggaatgctggtaaaggccatagccaccgcaatccccagccatgtataggtgactttgatatcaaacttcgccagccattcaccgtaaaaaccgtttacggaaaagaggctggccagcgttaaaccggcgacagccgttggcagcgcaaagggtaaatccatcagcgcatcaagcagcgtgcggcctgggaagcgatagcgggttaggatccacgccatcagcagaccgaaaacgccgttaaaaatgcttgccacaaacgcgctcagcagcgttactttgtaggccgcgaccacctgcgggttggtgatcacctcccagtactgcgcccagctcatctgggccagttgcatcaccagcgcggagagcggcagcagcaaaatcaggcacacaaacagcagactggtgccgaggcttaaggtaaagcccggcagcacgcgtctggaggagacagcaaacatcagttacgccccgccgctaacagcttgtctaactcgccgccgctggtgaagtgggttttcatcacttccggccaggagccaaatttgtcttccacgcggaacagctcggtctgcgggaatttgtctttcagtttgtccatcacctccgggttattcacgcggtagtaatagtcggtgatgatggtttgcgcctgcgggctatagagccagttcagataggctttggcggctttttccgtaccgttggcctgcacgtttttatcaacccacgccaccgggaattccgccagaatgttggttttcggaatcaccacttcaaagccctgcgcttcatactgtttacggatgttgttcacttcgctttcgaagctaatcagcacatcgcccaggccgcgctcggcaaaagtggtggtcgcgccacgaccgccagtatcgaacacttcaacgtttttcaggaactgggtcataaactgttcggttttgcctttgtcaccaccgtcagctttatccgctgcgccccatgccgccagataggtataacgcgcgttaccgctcgttttcgggttcgggaaaatcagcttcacgtcggagcgcaccaggtcgttccaatcgtggatattcttcgggttacccttacgcaccaggaagcccatggtggagtagaacgggctgctattattcggcaggcggctctgccagtcggccgggatcagcttgcctttatcgtgcaggatttgtacgtcggtcacctggttataagtgacaacgtcggcttttaagccctgtaaaatcgccagcgcctgtttactactcccggcatgagattgttttatcgtcagtttgtcgccgccgttatcttttgcccattgttgctcaaacggcggattcagggcggcaaacagctcgcgggagacgtcataagaactgttcagcagttccgttgcctgtacatggcccgccagcagcagagaagcgaccagcgcgagactgttctttttcagtaagttaacggccattgcgcacccttataaatttaatgactttctaatagccatcatatttataacggacgtgaaaggagtaacggttttatataccgtttggtgatttggaagttgaaaagggaataagaacttggttcaacaggcgtaattgttgcagtcagtttggacacgaacagcgcggagaaaccggagcgtacacatagtacgtgaggatttcgagcactgcccggggccaaaatgacaaataaaatagcctggtgaacttagttcaagacgaaatcctccccacaaatgcagggaggaaacagaggtgaatcagataccgacgctaaccgtctccggcagtgtgctgccgccatcaatcacattctgtgtaccggttaaatagctggattcatcgcttgcgaggaaggccgccagttcgccgacttccagcggatcggcgaggcgacgcatcgggattgctttcgccatttcagtcagcacgctctctggatcttccgggttgctctggcgggcaatgctttccgccattggtgtgcgcacgtatcccgggcaaatggcgttaacgcgaataccagactgcgcgtactccaccgccaggctttttgtcaggccaacaatcgccgctttcgttaaggcgtacgccgtttcgccaggatcggccaccatatcaccagtgacactagacatcatcacaatgcgaccatctttgcgggcaatcatctccggcagcaccgccttcgtgacgttccatacgcctttaatattgatgtcaatatggaaatcgcgatcgtcatcgctcatatcgaggaaactgcccagacgacaaacgcctgcgttattcaccaggatatcaatgcgcccttctttttccttcgcgcgtttgatagctgcggctacgctcgccgggtcacgcacatcggcgacaaccgccgtacagcgatgaccacgaccacacagttcgtccgccagcttttcgatctcaggggagatatccagcaagattaggttcgcgccatgacgtgcaaaagttctggcaattccttcgccaattccctgcaatgcgcccgtaatcagtgctgtcttgcccgtgagtttacccattttaatgctctccttgttaatacagagcgttacactccattccctctgaaaatacaggataaacaaaatattgctgcggatcagctcactaattcaggaaaatctcaatccagtcgctgctttatgcatcatttcaggcgttgtgttagctcactgctgcgctgaatcattttcaaactctccacatcattgagttgcacaaggccaacaaacagtaaatcggtaacagaattttgcgccgtgcgggtagacatgctgctgctacgccattcggtttctccggaaacggtatcgagggtgaaatgcgccagccgccgcagcggagagtcagtcagagaagtaatggcaatcaccgttgccccctgctttcgtgccgcttctgcgcacaagacaatctcttttttactgccgctgtaagagatagcgatttgtacatcgccttttttcaacgcctgagaaacggtggcttgtacgtgcgtgtcggcttcgcaggccacgcgatagccaattttcatcagtttgaagctcagatcgcgccccaccagcgcgcttccgcccaggcccgttatctggataaacggtgctttactgatgacctcaatgattttttgcagccgcgcgtaatcgagcaacgcgcaggtttgctccagcgccagctctttttcgcgattcagtttgcgcgcgatcacttccaggctatcatcactggtaatgctactgtgcaggtgcagtgccgtggcattcgttttctcccggctggcactgtattcgcctattaacgccatacgcaattcagtaaatccttgcgcgccgagtttttgggcaaatttcactatgctgctctggctaatgccgagctgtttcgccatctgccgactagaaacggattgcagctcactcacgttggcctgcagaaagtcagcgattttttgctcgttttcggtgaattcactccccgcattgcttattttcgtcaggtacaacatcttccactctcctgggctggcagcataaattccgcttaagttcttatgacgctcttcacactctgcgagtgtagactcaatgattcctttaagcctgtcaattcgggatatatgattccatacatctgcaattatttgatcgtaaatagtaaggtcaccaccgatgcaatttgaaaagatgattactgaaggcagcaacaccgccagcgctgaaattgaccgcgtaagcacgctggaaatgtgccggattatcaacgatgaagataaaaccgtaccgcttgccgttgagcgcgtactgccggatatcgccgcggcgatcgatgttatccacgcccaggtaagcggcggcgggcgtctgatttacctcggtgcgggaacatccggtcgtctggggattctggatgccagcgaatgtccgcccacctacggcgtgaaaccgggtctggtggttggtttgattgctggcggcgaatatgccattcagcacgcggtggaaggcgcggaagatagccgggaaggcggtgttaatgatctgaaaaatattaatttaacggcacaggatgtggtggttggcattgctgccagcggtcgcacgccgtatgtgattgccggactggaatacgcacgccagctcggctgccgcacagtgggaatttcctgtaatccggggagcgccgttagtaccaccgctgagtttgccattacaccgattgtaggtgccgaagttgttaccggttctagccggatgaaagcaggtacagcgcagaaactggtgctcaatatgctttccaccgggctgatgattaaatccggcaaagtgttcggcaacctgatggtcgatgtggtcgccaccaacgaaaaactgcatgtgcgacaggtcaatattgttaaaaacgccaccggatgtagcgcagagcaagcggaagcggcgttaattgcttgcgagcgcaactgtaaaacggccattgtgatggtgctgaaaaatctcgatgccgcagaagctaaaaaacgcctggatcaacacggcggctttattcgtcaggttttagacaaggaataacccatggccaaagagatcagcagtgaacttctgaacaccattcttacccgtgtcggcggaccgggaaatatcgccagttgtggtaactgtatgacgcgcctgcgtctgggtgtacatgacagtagtctggttgatcccaatatcaaaacgctggaaggcgtgaagggcgtcattttgaccagcgaccaggtgcaggtcgtttttgggcctggtaaagcgcatcgtgccgcaaaagcgatgagcgagctgctgggagaagcaccggtacaggatgccgcagaaatcgccgcccagaacaaacgtcagttaaaagccaaacaaacctccggcgtgcaacaatttctcgccaaattcgccaccatcttcacgccgctgatccccggttttattgccgccggtctgctgctggggatagcgacgttaattgccacggtgatgcacgttccggcagatgctcagggaacactacccgatgcgctgaattttatgaaggtgttcagcaaaggtttgttcactttcctggtgattctggtgggctataacgccgcccaggcatttggcggcacgggcgtaaatggcgcaattatcgccgcgctctttttgctcggttataaccccgcagcgaccaccggttactacgccggttttcacgatttctttggtctgcccatcgatccgcgcggcaatattatcggcgtgctgattgccgcgtgggcctgcgcccgcattgaaggcatggtgcgccgctttatgccggacgatctcgacatgctgctgaccagcttaatcaccctgctgatcaccgctacgcttgcgtacctgatcattatgccgctgggtggctggttattcgaaggtatgagttggctgtttatgcacctgaacagtaatccgttcggttgtgcggttttagccgggctgttcctgatcgccgtggtatttggcgtgcatcagggctttattcctgtttacctcgcgttaatggacagccagggattcaacagcttatttcccatccttagtatggcaggcgcgggccaggtgggcgcggcgctggcactctactggcgggcgcaaccgcacagtgcgctacgcagtcaggtacgcggggcgattattcccggcctgctgggcgttggtgaaccgctgatttacggtgtcaccctgccccgcatgaagccgtttgttaccgcctgtttaggcggcgcggcgggcggtttgtttatcggcctgatagcctggtggggtctgccgatgggcttaaacagcgcctttgggccgtctggtctggtagcgctgccgctgatgacttccgcacaaggcatccttccggccatggcggtttatgctggcgggattctggtggcatgggtttgcgggtttattttcaccacgctctttggctgccgtaacgtcaatctggactgatatcatgaaacggacaatgctctatctttctctgctggctgttagttgtagcgtcagcgccgcaaaataccctgttctgacagaaagcagcccagagaaagcagggtttaacgtcgaacggcttaaccagatggatcgctggattagccagcaagttgatgtcggttatcccagcgtaaacctgctgatcattaaagataatcagattgtgtatcgcaaagcctggggagcggcgaaaaagtacgatggcagcgtgttgatggaacagcctgtcaaagccaccaccgggacgctgtatgacctggccagtaacaccaaaatgtacgccacgaacttcgccctgcaaaagctgatgagcgaaggcaaactgcatcctgacgatcggattgcgaaatatattccggggtttgccgatagtccaaatgacaccattaaaggcaaaaacaccctgcggatttctgacctgctgcatcacagcggcggtttcccggcagatccgcaatacccgaataaagcggtcgcgggcgcgttatattcccaggataaaggccagacgctggagatgatcaagcgcacgccgctggaatatcagcccggcagcaaacatatctacagcgatgtcgattatatgctgcttggatttatcgtcgagagcgttaccggtcagccgcttgaccgctatgttgaagagagcatttatcgcccgctcggcctgacacatacggtatttaacccgctgctgaaaggctttaaaccgcaacaaattgccgccacggaattgaacggcaatacccgcgatggcgtgatccatttcccgaatatccgcacctccactctctggggtcaggtgcacgatgaaaaagccttttatagcatgggcggcgtttccgggcacgcaggtttgttttccaataccggcgatattgcggtgttaatgcaaacgatgctgaacggcgggggctatggtgatgtgcagctgttcaatgcggaaacggtgaagatgttcaccaccagctctaaggaagatgccacttttggcctcggctggcgcgtgaatggtaatgccaccatgacgccgacgtttggcacgctggcaagcccgcaaacctacggtcacactggctggaccggaacggtgaccgttatcgatccggtgaatcatatgacgattgtgatgttaagcaacaagccacatagcccggttgccgatccgcaaaagaatcccaatatgttcgaaagcggtcagttgccgattgcaacttatggttgggtagttgatcaggtgtatgcggcgttaaagcagaagtaataaaaaggccagtcagtaatgttactggctggtctgagagtgctgacaaacgcaaaactgcctgatgcgctacgcttatcaggcctacgtggagcccacaatatattgaattagcacgatttcgtaggccggataaggcgttcacgccgcatccggcgtgtacaacgcgcacttggtcaacaatctgaggccagtcagtaatgttactgcctggcctttaatcaatgaatcagaaacgcttacagcgccatcaacttgtccaggctcggtgcgaaataatagccgccggttaccggtttggtgaaacgcaacatcgcatcacgcttaccatcggtatcgccaaacatgctcagcagttgctgctcaatgttatgcagacgcgcgcagtaggcgcagaagtacagaccgtgagtgccactggcagtgccgtacggcaggctctggcgaacaatcttcagccctttgccatcttctttcagatcaacgcgggtgaggtgagaggtttccggacgttcgtcgccgtcgatctcttcgttggcctctttggtgcgcccgatcaccatctcctgatcgtgaacgctcatccggttgagctgcttcaggttgtgttcccaacgctggacaaacacatagctgccgcccgcatccacgccgtctttgataaccgccacttcgcgacgcgtctcttcacccgccgggttttccgtaccgtcaacaaagccgctcaggtcacgctcttcaacccaacggaagccgtggatctcttctttcacttcaatgcagtcaccaaaggcttccatcgccgcctgggcgacagagaagtttacgtcgtgacgcagagaaagaatgtggatcaacacatcgaactgggtcgtcggcgcaaggcctttaccgtagcccggaaaatctttcagctcttctgccccaacgccgccgctcagagcgcgccaggtgttgttaccaaaggcaaccaccgcaccaagatgcgcgtccgggaatttcgcttcaaaagttgccagtttgtcggcaaatgttttactggccgcacgcagggcgtcaacttcccctttcacgttggcttcgatccaaatcgccgcgcggcaatgttctggcaaaatgccactctgaacctgagacattgttcctcctgaaaataataatgccacgcaatccgtggcattgttgagcgctattttacgtgttttttcgcggcggcggtttgttcagacgcaaattaacgccgccagataattttactgactttccagtttttcagggtatcgtcgctaggcattaacccttcaggaccacgccattccccgctgaactggtagctaatatgttgactgccttcggctttacattcgacggcacgattatcatcaccatcagctttttggcaattgccaaatgctttgctgtaaaggtcgctaaacggtgtaccgattttaacaccggtgtcagcaggaatatcgctatccagcacgtcaatgcgactgatcgtgccttgatcgccgttaatcaccatcgccacgttgtcgcccttcatcacttcaaaaaagcgcaccacgttgccgttcgcggttttcattccgctgcgcaggcgataatcgccatcaagcgcatcggcaatggcttgttcttgcagtggtgtggacgccgttaattcacccacgccctgctcgctcactttggtggagctcccaaaccagttccacgggttagcggcagaccagttaacactgctcatcgtggaacagccggtcagcatcaatggcatagcgcataacattaaacgcaggcttttcatgtcacttcctttggttattcaataacgttgcttggagtgcaaattcaccaaaaagtgccgttattcttttacttcataaaaacaagcgcgtaaacgtcgattggtcagcagccagattaacgccacaatatccgccactaccagcgccagaccgataccgctaacggattcaccgttcagccacagccacggttgccagcaaagtaaaaccacctgcgccaacagcaacagaaaatagagtacacgccaggtgcgaggaaacgtagcccgccgaccgctcaacaaaaacgccagcaccgccggaatgccaggaatcagccccagccagaaattatcgtgatcgggataaaacagatttagcagcgcagtaccctgctcgcggctcgcaccggcaatgacaaacagcacccaggttcgcgcctgaagcaatagcacaagccagaagagcaagggtaaacgcaggcgaccgtgcgcatcataatggacaggatgaaactcagtactcttcatcttcaatcaaacgcttacccagactcagcacgtcggcgtgttcatatcccaggcgttcatacattccgagcaccatgtcgttatcttccggcacattgatctgaattttcgggcagccacgagcaatcagctttttctccagccgattaagcaacgcattggcaatcccacgcccacgaaactctggatgcacgccaagataataagcagacccgcgatgcccgtcataaccgcccatcaccgttccgaccacgtcaccgtttacctcagcgaccaaaaacaaactgacgtcatggttcatcttacgctcgatgtccatttccggatcgttccacggacgcagcaagtcgcaacgctcccaaagggtgatgacctcttcgaaatcttcctggcgaaatacgcgtatctccatggtattcgttacctttttgcgggttaaaaggctgattatggcgtgaacggtcgaattagccaatatctgacgaaaatcggttgaaaaagtggcataatggggagttgtcaactattgaaatgaaaagtaaaacaattctcaacagcaaaccgtcgtaacggattacgcgatacgatataacatctggaactttattattacaactcaggccgtatgagcacttttaaaccactaaaaacactcactagccgccgccaggtgctgaaagccggtttggctgccctgacgttgagtggaatgagccaagccatcgccaaagacgaacttttaaaaaccagcaacggacacagcaagccgaaagccaaaaaatctggcggcaaacgtgtcgttgttctcgatccaggtcacggcggaattgataccggagcgatcggacgcaacggtagcaaagaaaaacatgtggtgctggcgattgctaaaaacgtccgttccattttgcgtaatcatgggattgatgcgcgtttaacgcgttctggcgatacgtttatcccactttacgatcgcgttgaaatcgcccataaacatggcgcagatctgtttatgagtattcatgccgatggctttaccaacccgaaagctgccggtgctagcgtatttgccctctctaaccgtggggcaagtagcgcaatggcgaaatacctgtctgaacgcgaaaaccgcgccgatgaagttgccggtaaaaaggcgactgacaaggatcacctattgcaacaagtgctgtttgatctggtgcaaacagataccattaaaaatagtctgacgctcggcagccatattctgaagaagattaagccggtgcataaactgcacagccgcaacaccgaacaagcggcatttgtggtgttgaaaagtccgagcgttcctagcgtgctggtggaaaccagctttatcaccaacccggaagaagaacggctgttaggcacggcggcgtttcgtcagaaaatcgccacagcgattgctgaaggcgtgatcagttatttccactggttcgacaaccagaaagcacatagcaaaaagcgataagttatgaaacccgacgcacaccaggttaaacagtttctgctcaaccttcaggatacgatttgtcagcagctgaccgccgtcgatggcgcagaatttgtcgaagatagttggcagcgcgaagctggcggcggcgggcgtagtcgggtgttgcgtaatggtggtgttttcgaacaggcaggcgtcaactttagccatgtccacggtgaggcgatgcctgcttccgccaccgctcatcgcccggaacttgccgggcgcagtttcgaggcgatgggcgttagtctggtagtgcatccgcataacccgtatgttcccaccagccacgcgaatgtgcggttttttattgccgaaaaaccgggtgccgatcccgtctggtggtttggcggtggcttcgacttaaccccattctatggttttgaagaagatgctattcactggcatcgcaccgcccgtgacctgtgcctgccatttggcgaagacgtttatccccgttacaaaaagtggtgcgacgaatacttctacctcaaacatcgcaacgaacagcgcggtattggcgggctgttctttgatgacctgaacacgccagatttcgaccgctgttttgcctttatgcaggcggtaggcaaaggctacaccgacgcttatttaccaattgtcgagcgacggaaagcgatggcctacggcgagcgcgagcgcaatttccagttatatcgtcgcggtcgttatgtcgagttcaatctggtctgggatcgcggcacgctgtttggcctgcaaactggcgggcgcaccgagtctatcctgatgagtatgccgccactggtacgctgggaatatgattatcagccaaaagatggcagcccagaagcggcgttaagtgagtttattaaggtcagggattgggtgtaactccctcacccccactcccgcatccgctgatgcagcgtcagactcggcttctcggaaaacagctgctggtaatccgtggcaaattgccccagatgccagaatccccactgcatggcggcgtcttttaccgtcatactttggctccacggacttatcagttcgcggcgtacggcgttcaggcgaatgcgtttcagccacgcgttcgggccaatgcctaaaatagcgtgaaacgcgttttgtagcgtgcggcggctgacatgcagttgattacacaaatccagcaccgtcaccggttcggacatgttttccagcacatattcacgggcgcgggaaagcaatcgacggtaactctgatgactgatgctttccgccgtcaccattggttgcgcttcttccagcatggcccccatcgccattagcaaattatcccccagcacttttcgcactgcaggctgatggagattttccggattctcgcaaaacgtcgccagcgcctgttggacaaagccccacagcgcggctttatgctgctctttcacttccagcgcgctctggttacgcaacatatgtaatacccgatccgggttatgcaaaaagttagcctgccgggtgatgacatcttcagaaagcaccacgcccaggatcgtgtaatcatccggcgtgctcagttcaaattcagtgccaccagggcgggtggcgatttccgcgcttcccagacattggctaccgataaatccctgctcaccgcgcgtcgccggaatgccaaaccagaagctgttcggccagaccaggcagctctgacgcagcgccagaccggtgtattcacgaaaaacctgaatatcatcgagtagaatttccgtaaattcaccatgaaacttgcccggatgcagctgatcgtaaatctgctgccaggcggtaatcgttaaagcatgttcatagacatccgttgtctgtcgttgatgaacattatccacttcgaccttcggcgtgagcttcaggttttcgggtaagggttcatgataaagatggtgcaaattggctgtacgggtctttttcatgatgttaatgccgggtgttgtaggacacccggcacctccgacaggttaatggggcttgagacgataacgactactgcgtttacgtaacgtcccggcagaaaagagctgttcgagcgcatttctggctttttccagcggccagccaaagtgggcagccacttctcctgccgtcattccctgacgtacacttgttaacagcgccaacaactcgtcagcagattccgcgacgataactggcgcgtcgggttcccttacgggttgcttcggctggcggttaaagccagtaaccagccactgggtgtcatcgtctggccgaccgatctccttgcggctgatgacacgcccggtacgcatcgcggcagcacaacctgcgtccagcgccgcacgacacgccgccagatcgccttccaccaccagcgttaagcgaccagggtcaagcacttcgtgactgagcagacgaacgttagctgctttgagcatggcatccgctgcatctatcgcggcgaccatgccgtccacttccagcaatcccagtgcattgatcatcggcaacctccgttacgcacgctggattggattacgcgcgatttccagcactgcatcggtaaaggcgttacaggctgctttacacgctgcctggctaccggttaaaaatgctgcgctgtagttggtttcagacggtggcgggacataggtcgccagctgtacgtcggcagacttcagggctgcatcaatgccataggtcgcttccagcggcggtgccaccagatacgccatcggatcgccaagcgtgatcccggcggtactactgagataagaaccggtacggctaactacatgtgccaggaatgccgtatcttgcgcgtcattagcccactggaaagctgcgccattttcaatatgcgcaatcatcgcatccagacctgcacgcacttccgccgggtttggcccaccaagcataatcagcacttcaccggcagtcggactcgggccgtgtgcagcgcccgcatataggctgcggccatacaccacttccaccatcgcctgcttggtcgcttcatcagcggcaatgtaggtgacgtcatcggagtcggcagaaatcagaccgaggctacgaatatgcggcggcaatttcagttcacgcgcaaaatcggcgttaacggaggcaatcacccgcatagcggtgacagacggtcgaatcaaatctaaagctggcatgatgcctccttatcgggtcatgttgatgccggatgctttctgctccagcatacgtttcgccaaatccacaatgacggctgcggcttcaaccggcggcgtgccgccctggtgaatgttagagatacaggtgcgatcggcctcaacggtggtcgccatacgcgggctgtaaacggcgtagcaggagaggctttcactctgacccaaccccggacgttcgcccaccagcaggatcactactttcgcgccgaggatctcaccgatctgatcttcaatcttcacgcgaccataacgaacaaagaatggtgtaccgactttcagcccggcctgtttcaggcccgccatcagcggtggcaggatctcttcgtagttcacggtgatcgcatcagtactcaggccatcagaaataacgacctgtacgtccggattggcaacacactgcgctttcagcgcttcaacagcttctgcacacaggcggcggcccatatccgggcgagtcaggtagagatttttgtcgctaatttcagagcgtacttccagcaagccctgcgctttcacccactcttccggcacttctttcagtacggtatctttgctacgagagtgatcggccaggaaacgcagcagcgcctgcgtacgtggacgcggaccggcacgaccggtacaaacgcgggccacggtgctgcggcgcagttctgttaatacgtctgcgcgatgcggattttcaacaccaatccacgcttttgcttcagcggaacctaaatccagcgcacagctttcgctggtcaccggtgccgcacagttggtggtggcgcactttgcttcactcggcgcgggggccgcttgtcccatactcgccatcacgctgcgtacaatttcttcaatctgtttttgatccatgatatgttatctccgcgtcatcagaagaacagactcggatcgcccgcccgtttggtcaggcgaccgtttgccataatgcccatgctttccagccagcgttcaaactccggactcgggcgcaggttgagtaactgacgcacagtggcggtatcgtggaatgcggtggtctggtagttgagcatgatgtcatcacccagcggcatccccatgatgtagttgcagcctgcggtggcgagcaggatcatcaggttttcgttgaggttctggtcagcgtcagcgtggttggtataacagcagtcacagcccatagagatgccgctcagcttgcccataaagtgatcttctaagccagcacggataatctggcggtcgttgtagagatactccggcccaataaagccgaccacggtgttgacgataaacggatcgtaatgacgcgccagcccgtagttacgtgcttccatcgttacctggtctgcgccgaagttagcgccagcggatagcgcagagccttgtccggtttcgaagtagaggcagttttccccggcgatacggttgaactccgcgcccactgcgcgcgcttcgtcgagcatcgccagctccacgccaaactctttcagccctttttcgctgccacagatactctggaaaatcagcccgcccggtgcgccacgacggatcgcttcgatctgggtggtgacgtgcgccagtacacagccctgagttgggatgttgaatttgtcgatcacgccatagatggtatccaacacgcggcttaagttttccacgtcgtcagtcaccgggttaacgccgatcaccgcatcgcccaccccgaaggaaagcccttcgtagatttgcgcggcgatactttgcacgtcgtcacgggtgtcatttggctgcaaacgggcgctaaaggtgcccggaataccgatggtggtattggcctttttgattaccggcattttcttcgcgccgtagatcaggtccgcgttggagcaaatcttcgctaccgccgcgaccacttcgctggtcagccctttgcgggtaaaggcaatgtcgtccacgctggtttcatcgctcagcacatactcacgcagttcgctgatgctccagtttttaatctggttgtaggccgtttcgttaacatcgtcctgaatcagccgcgtcacgcagtcatcttcataggcaatcaccggattattgcggatgtccgctacggtcatttcgctcaacacctgctttgccgccacgcgctcctgactgcttgccgctgcgacgcccgccagcacatccccgctacgcagttcgttggctttagccagcacctcttttacatccttaaactgatatacattgccgaacaatgtggtctttagtttcataagtcgttccctcaggaaggaaatgcgagacttttcaccgtcaccggcacaacgcttccgccaaaaagaggcgtaccaatgtcgatatagtcccccgcgcggacaatcacttcgtcaatgactgccaacgggagttgttgtagctgtgggcgcaacaacatgcccagagctttaccaaagtcctgcccggccaccaccagcaggggatgcggattcggaaaacgcgcgacgaaatcgaccaacgcgttgatgaccgtcagtaccgcggcgtaacgcacaggcaggctggcgggaagcgccagcacgtacgcgtcagttttgggatcaagatccagctgaatcagcgcctgttgccaggcccccaccagatccgtttcatcaatcgggatcgccaccggcaaattgcgcagcggcagttgtacgccctcaagccagattgtgctgccagagaggctaagggtatgcgcgcccgcgccaatcaccgtggcgcgcacggtttgcgccggaaactgtacgttcatctcacgcaggcgcggatggtcatgcagcgcagttgccagcagcgggccaatatcggcaaaacagaacgggtcggcgggctggtggcgataacattcgcccacgccgccagaaagcgtaatgatttcgggcgtaacacctgcgggcagcaaaccggtttgcatcaatgcctgcgcgagcggactgagcgttccgtcaatcacttcgacaatcagttctgccatccgccgggtcacctgcaccagctgcgcgccggtcaggctacgggcgtcggtgcctgcaccgaagcactcatccacaatcatctgccccggtttatgagcgtaaaccacgcgcccgtggctgtcggtttccagcaggcgaccaccgacgttgaggcaggcagtgccgctgatttttccggcatcgaacagggcgtagttcgcggtgccaccgccgatgtcgatattcagtacccgacacagccgttgttcagaaagggtttgtgccccggctccgtgaccggcgatcacggattcgaggtgcggcccggcgctggcaacgacaaaatcgcccaggctctgagagagcgccatcaccgccgggcgagcattgcgggttttcgcgctttcaccggtgatgatgatggcaccagaatcaacgctttccggctcaatacccgcagcatgatattgctcgagtattaaggttttcagttccgcttcttttaaaccgccctgtttatcgacaggggtaaagaacaccggactttgccagctaatttcgcgtttaatgaattcgtagcgcggcacctggctcaccgccgcacggttaaccagctccagccgggagaaaatcacctgggtggtggtggtgccgatatcgataccgacgctcaatagctggcgagtgttcacgattgtgcctccgcttcggtttaagtcagctttgtgcctccgcttcggttttagtcgcggtcgcgtcttcttttggcaccagcatcatcgccacgccaatcgccgttacgccgccgatcaacttgccgacaatcatcgggaagatcatggcgttcatgttggcagcggcgaagcctaagtggtcgcccagggcgaaagcagcggaaacggcgaaggcgcagttgatgactttgccgcgggtatccatctgcttcatcatgccgaacatcgggatgttgttggcaagcgttgccaccatgccggctgccgcgatgttgttcatattcagtactttaccgacgctcatcagcggtttttcaaaccagcgagtcagcagcagcaccatcggatacgcccctaacagaacgcaggagatagaaccgataacttcaatggcgcgcatcacctcaccgggtttatcgccaggggccataaagataggatccagaccggggatcagttcccagccaagcaggaatttcactaccgcagcggcaagaccgagggtgatcaatgcaacgaggaatttggcgaagatctggaagccgttgatcattttttccgggatgaatttcagccccagcgccaccagaatcgcaacaatgatcaccgggatcatgttcatcaggatcagggcgaaagtgaattccaccggctggccgttgatctgcacaccggagtacatagcaaccagaccaccagcgatacaaccaatcggaatggtcacaatgcccgccagcacgccgagcgccagataacgacggtcagaaggttcgataatgccgagcgccaccggaatggaaaacacaatcgttggccccatcatgctcccgagaattaacccagagtatagccacgcggctacgtcgccgcccgccagctctttggcgaggaagaagccgcccatatcgcacgccagcagtgttccggcgaacatgcttgggttagcgccgagcatttcgtaaaccggaataattaccggcccgagaacgtgagccagtaccggtgccagcgcggtcataccgaccatcgccaggcccagtgcgcccattgccataaagccttcttcgaactgaccgccacttccttcgatacttttaccgaacttaccgaggaaacgagcagaaccgccgaactggctcaggatcctgtctacggcagctatcagcataaagaacatcatgatgtacatgatgatttcgttaattcccatcgcctttactccctgttagttgttatttattggcggatgcggcgtaaacgccttatccgccctacatgtgcaatcccgtaggctggataagacgcggcaagcgtcgcatccggcaattgcaccgcgccactggcggatgcggcgtgaacgccttatccgccctacatgtgcaatcccgtaggctggataagatgcggcaagcgtcgcatccggcatttattgcgccgctgcgtacaggccgacaatctgctccaggctggcggtacgcgggttactgcgcagacaaatatcttccagcgcggcctgcgcccatgcgccgtaatgcgcagatgtcgcaccaacatcgcccagtcgtttaccaatcccaacttccgcaatcagctcacttaccgcgttaatagcgtcacgatcgtcggattttttagttcgcagtgcccgaccaatctgactaaagcgttcacgacaaaccatccggttaaattccatcaccgttggcagcaacatggcgttcgcgagaccgtgcggaatatgcagcgccgcgcccggctgatgcgccatcgcgtggcacaacccaagacccgcactggaaaacgccattcccgccatacaactagccagcaacatgctctcgcgcgcggcaaggtcgtgaccgtagcccaccgctttcggcaggcttttgccaatcatcgcaatggcaccaatcgccagactgtcggtaaacggtgtagcgttcagggcgctgtatgcttcaatggcatgggttaacgcatcaatgccggtcatcgccgtgacatggctcggcacaccttcggtcaatgcggcgtcgaggatcgccacatccggcatcaggctggcatgggctaacacctgcttgcgcccgctcaccgcgtcgataatcaccgttacattggtggtttcagagccggttccggcggtagttggaatggcaatcagcggcaagcgcggttgcagaacgctggtttcactcatctctgccagcgtgctatccgggttcgtcaccagcaacgtcacggctttcgccgcatccagcacgctgccgccgccaaacgcgatcaccccatcacagccactctcacgcaactgcgccacggctgcacacacgtcggtaatgcacggttcgcccaccggacatggccagagcgtcatggcgatacctttaacggtcaggctacgcgtcagcccggcggtcatccctgcctgatgcaaaaagctgtctgccatcacgaacagatgtttcagcccacgcgtttgcgcttgctgtccgcaactgctcacgctgcccggaccgcaaagcgtcaccggtggaacgctaaatgtttttacccgttgcagattcagggtatcgaacgcctgaaagagcgcggtctgcaattcattttgcatatagcccctccgctttctctcgcccactactggcgatcgccagcggggtcataaacaaactgtgctgcggtaaatgcacctgtaacgccgggaattgtttgcgaaacagttccgccacgcccggttgcatacaagagccgcccgccagccataaatcagtaatgccctgcccttcaatatgccgggcgacaatgtccgccattttttcgtacaccggtttcaccgcaggccaaatctcttcaccgtgaccgcgcttgtactgctccgcctcttccaggctaatacggcgatttccggcgagagtcagagagatgtgatgtccgccggtggcttcatccgcgctgtacgtcaccttgccctttttcacgatggcaatgccggtagtgccgccgccgatatccactacaccggcgttgtccagttgcagcagatccgcaactgcggttggctcatccagcacatggctcacttccagtccggcagattccagcacgttgatggaaatacgcgggtccgtacctggaggaaaactagtcgccgcatggctaaaacgacgaccgaattgctgctcgagcgtgtcgagatggcgacgaacaatggtgacagcgccgaagaaatcccagacgatgccgtcgcgaaccacatcggcccagtcgaggcataccgccactggctgaccgtcgcggtcgacaaccatgctcaccacatcgcaggtgcccagatccacccccagccacagcggagattccgtcgcggcgggcgtctggttacacagcgttgccgccgtttgcagacgtggggtgagccattgttcgtcgtgcgccatctgttactccttaaacaatgcgaaacgcatcgactaatacacagcgacgcagacggacaaacgtacgcgcgctggttaccccttcaccggttggcgtggtgatggtcatggtggtccagccttccccgcccagccccagcccggcaatgcacggtccgttcttaacgaaaatgctggtatcaatagcattcgccatctggttcatgttttcgatgttgcggctgtgcattgccgccgtgtggtggcaaccgccttccagtttcaccgctagcgcaatggcatccgccacgttggcgacgcgcacgacgggcaacaccggcatcatcagttcagtcacggcaaacggatgttctgcggtggtttccacaaacagcaggcgcgtttcttgcggaactttaaggccgattgccgccgcgattttgcctgcgtcgcgaccaacccagtcacggctgacggtgccttttccgcgctcgtcgatatttttcagcaacaccggttgcagctgctgcgcctgttctgcggtcagtttcaccgcgtgctggccttccatcagacgcatcagttcatcggctacgctatcaacaacaatcagtaccttttcgtcggcacaaatgatgttgttatcgaaagaagcgcctttgacgatggactgagcggcacgggcgaggtcggcggtttcatccaccactaccggcgggttgccagcgcctgcggcaatcagacgtttattggtgtgtttacgcgccgcttctactaccgcttcgccgccggttaccaccagcaggccgatacccggaaacttgaacaagcgttgcgcggtttcgatatccggatttgccacagtaaccagtaagttttccggcccacctgcggcaacaatcgcctggttgagcagcgtaatcgcccgctgggagacttttttcgccgccggatgcggggcaaaaatgacgctgttgcccgcggcaatcaggctgatggcgttgttaattacggttgccgccgggttagtggaaggcgtcacgctagccaccacgccccagggtgcgttttcaattagggtcaggccgttgtcgccagtcagcacttgcggagagaggcactcaacgcctggtgtgccgcgcgcctgagcgacgttttttgcaaatttatcttcaacgcgccccatgccggtttcactgacggcaagttccgctaaatctctggcgtgtttttcgcctgcttcacgaatggcagcaatggctaactggcgcattgccacgctttttaacccttgctgggcgactttggctgccgcaacggcgtcatccagggacgcgaaaacgcccatctcatgaacggcggcggacggcgtgtcactgctttgcattttcagcagtaccgctttcaccacctgttcaatatcctgttgattcatgatgttctgccttatttgtggaaaattacctgaccgccagacaccacctcatcgacaatgccaatcacgcacagatcgaccggactcgtttcgcttttatgcgcctggcgggcggaactgccactcaccagtaacacccactccccggttcccgcgccaatattgtcgatggcgacggcgcattgcccgtcaggattaccttgtggatcaatcatttccaccatcagcaatttgtcatgcgccagtccgtgatggcgtacggtacaaacaatttgtccagtgacgactgccagtttcatacccgcctccgtggcgtatttcaggtaaaagctccccctaccctccgcagaaggtaaaatgaaaaaggagagagcgtgacgcccgaatcgacgtcacacagggtgattacaggttgctgctatcgcctttcaggccgatcgggaagacttcttccaggtcgccgtgcggacgcgggataacgtgtacagataccagctcgccgatacgctgtgccgctgcggcacctgcatcggtcgcggctttacaggctgcaacatcaccacgaaccatggcagtacacaggccgccgccaatctgcttaacaccaaccagcttgacgcgcgcagctttcaccatcgcgtcagaagcctcaatcagtgcaaccaggccccgggtttcgatcattcctaatgcttccattgtgctttcctctttatcagggtccagaacgggaccgttcattcaaccagtgtttgtaaactgctttcgcggttcacttctgtctgacgcggcacagctgccaccagcgccagctcgataatttcctgcacgctacaaccacgagagagatcgtgcatcggcgcggcaagtccttgtatcagtggcccgacggcacgatatccgccgagtcgttgtgcgattttgtaaccaatatttccggcttccaggctcggaaaaaccatcacattggccttgccctgtagcgggctggcaggcgctttttgcgccgccacttccggcacgaaggcggcgtcaaactgtaactcgccatccaccaccagctttggtgcgcgctcacggacgatttctgtcgcctgctggacgttagcaacacaggggtgacgggcgctaccattgctggaaaagctcagcatcgccacgcgcggctcttctccggtgatggcgcgccaggtttcggcactggcaagcgcgatatccgccagctgcgccgccgtcggctgtggcaccacgctgcaatcggcaaagcccaacgccgggccgctgtactgtggcaacatcaggaaaatggaagagagcgttttacagcctggctgcaagccgataatgcgtaatccggcacgcagcacatttgccgtggaagagaggttgcccgcgatacagacatccgctttaccggcgctgaccattgctgcggcgaacatcagagggtcggtaagtttttccagcgcatccggcggcgttttttcgcccgcgcgggccagccagcgatgagcaaattcttcccgcattgcgaggttgccatgcggatcaatcacctgtagcccgtccatcgccacgccgtgactgagcgcaaactgacgaagttcaaacggattggcgaccagaatgggcgttgccagaccttgttgatgtaaatattgcgcggctttcagcacacgttggtctaacgcatccggaaaaaccactctggcgggcgctcgcaacgccagttcacgacaacgttcaataatcattgcgtttcccccagtcgttgttggatctgcttcaccgttagcggctgcttcgttacgctcaggatcatcatcacgtagaccgtgctgctaaggcggttcagcgcctgcaaaatgtccgggcgtaatacttcaaagctgcgggtgataaagacctgcgccgctacggtttcggtttcccgcactttggtgcgtagcagattgagcaacgcagcatcgcgcccgtggctggcttccggcaccagatgatcgtggtcgagatagcgcagcggctgatgagaaagccgatgcagatcttcgtcagaaagcccgacaatcgcctggcagcccagcggttcccccagcgcatcggcgcgcataatgttgccaagacggctacggatatccgccagccacggctgccacggttccgccagttcaatttgcagccacactgccagcgcaatggtgctgtcgagaaccgcgcgaaaacccagacgcggatcgcttttggcgaccattttttccgcgctcaggtgagtcagcgtatccggcttttttgccaccggctggcgacacagttcgcagcacgcctgcggatgttcatcgctactggtcagcccatgaacgggctgcggctgctgctgttcatcgtcaacaaacaggcggccctgctcgtcaataaacttgatgcgcagatggcggctttccagcaactcccgggcagagggcgtcaggcgactgtccgcagggagatggatctctgcgccttcgctgagcgtatggttcgctcttagccatgcttcggtgatgaaatctttcatagggattgccagttagccggccaggcgacatacaggaatttcacgctggatgtcgtaccaaattcgatgctggagcctttcgggataaacatcacgtcgcctgctttggcgatcatggtttggccttcgtggcgaacatgcagctccccttccagcaccatgtcgatttcgtcgtagttcagggtccacgggaagaatgcgttctcccactgcataaaaccggcggccatgctgctgccgtcgtctccggtcacaagatcagtcaagcccacgcaatgcggctctgcgccgtcgaaacgaccaaacttgacgctactgccatcaatcactttgatgccgcctttgccggtcacgcttttgaagctcggctgcattgcgccctgctccaggctctgtttttccttcatcactttttccatcagctgtgcgaccaggctttcggtaaactggccttccggcagctgggcaatgatggtttcgcggatgcgctggctttcggttttgtcggctggcacgctggcgggcacggacgccgttaccgggatgctttcatcacattcggtgatggtaaaacccagtagatccgccacttcacgggcttccggggtaataatgctggcgcgcagaaccacggacattgcctgttcgccgcgcgcgtgtgcttcacgaatatcattcgctgtgatgagttttttcacctgcttcctcctgtttggtgagagatgccagataatccaccagttgctgcacgctttgcgggtcgtggctgtttagctcgaacatcggctcttcgaaacccgtctcaagcaataactttcgcgttgcggcgacgtcagcatctggcatgtccgttttactgatgacggcgatttgccgtttgctgacgccaatatccagcaacccggcaggcaaccgactttccgggtcatttgcgccatggacatagatcagcatgtctacatcctgtagcgtggtaattaaggcgtgataccagcggggatggttaaaatattcacccggcgtatcaatatcgcccttatcattaaattccacggcctgtgtttttctggcgagggtataattcccctgcaacgcattaaataacgttgtttttcctgccccgacgctacccacaaacgcaattcgtttcatgaatgcctcgtattaacttttggtcatttcacaaagcgtataatttaataagcgacctaaaccgctgacggtttgacttaacgcttcttctactgcgcccacgctgccataaatcaccaatgcaccgctgaatcggtcgagaaaaccgatatgcacatcagcggctttcagcgctaaatcaccggcgatcatcgccgtttcgccgggagttagcgtcataatgccaattgcgcccgcatccggaacgccgattttcttcgccagttcctcaccgggatgcgcgatgagatgcgccagtgtgacctgtttgccgggcacaaattcctgaatgatgcgttctttatccatgagtcgccgcctgtgaaaaactttcgtgtatcgtgacaatttttcgtcagagtaaataacaaaattcggcaagcgcgtttaaaaggtgaggtagatcactaagaatggagagatattcgctgtggtgcataaactttcatatgcaacgcatgaatataaataaaataatatcgagatattatatagactgcttttttttattattcgcaaactcagtaataagctttactaatatattgcagctaaactgcttaccctgaatattcagggtaagcgtgagagttaaaaaaaattacagcggttgggtttgcgcttctaccacggccagcgccaccatgttgacgatacgacgcacgcttgcgatcggcgttaacacgtgaaccggtttcgccacacccatcagcaccgggccgacagtcacaccttcgctgctggaaacacgcagtaagttgtaactaatgcgggcagcttccatgttcggcatcaccagaatattggcggaacctttcaaagagctgtccggcatacggtcgttgcgaatcgcttccaccagcgctgcatcgccgtgcatttcaccatcaatcatcagttctggtgcacgttccctgaccagttccagcgcctgacgcattttgctgctgctcgggcagtcagaagaaccaaagttggagtggctcaacaaagcaacgcgcggctcaataccaaaacgacggacagtttctgccgccatcaaggtgatctccgccagctcttctgcatccggttcatcattaacatatgtatcggcaataaaggtgttaccactcggcagcagcagcgcgttcatggcacctgcggtgtgaacgccatcgcgataaccaaagacatttttcaccacgctaaaatgttcatgataatcacccaccgtaccgcaaatcattgcatcggcttccccacgctgaaccatgatcgcgccgatcactgtcgggttactgatcagcgcccgctgcgcctgttcctgagtgacgccgcgacgcttcatgatctggaagtattcggtccagtactctttaaagcgcggatcggattcgttattgacgatctcaaaatcaacgcccgctttgatctgcaagcccagtttctgaatgcgcatttcgatcacgttcggacgaccgataaggatcggtttcgccagtcccagcgttaccagttcctgagtggcatgcagaacgcgcgcctcttccccttccggcagaacaacgcgcttcggcgctttgcgagcctgggagaaaatcggcttcataaacaggttggttttgtaaacgaactcagtcagcttgtcgatgtagacgtcgaaatcagcaatcggacgagtcgccacgccgctctccatcgcggctttagcgaccgcaggagcgatcttaacgatcaagcgcggatcaaacggctttggaatgatgtattccggaccaaagctcagatcctgatcgccatacgcactagccaccacttcgctctgttccgcatgggcgagttctgcaatcgcacgtaccgccgccagtttcatctcttcgttgatggcggttgcgccaacgtccagcgcgccacggaagatgaacgggaagcacaggacgttgttcacctggttcggatagtcagaacgaccggtgcaaatgatggcatccggacgcacttctttcgccagcggcggcagaatttccggttccgggttcgccagcgccaggatcattggcgcacgagccattttcttcaccatttcctgggtcagcactttcgggccggaacagcccaggaaaatatccgcgccttcaatcacatcatcgagggtacgtttgccgtcatccaccaccgcatatgcggctttggtttccgccatgtttggctcacggccctgatagataacgcctttactatcgcaaaccacgatgttatgtttttgcagacccagcgctaccagcaggttcatacaggcgattgctgcggcacccgcgccggaaaccaccatccgcacgtcggagatgtttttctccaccacgcgcaagccgttgaggatggcggcagtgctgataattgccgtgccgtgctgatcgtcgtggaataccggaatattcatccgctcgcgcagtttctgttcaatatagaaacattctggcgctttaatgtcttcgaggttgatgccgccgaaggttggttcgagcgcggcgacaacttcaataaatttgtccgggtcgagttcgtcaacttcaatgtcaaatacatcaatcccggcgaatttcttaaacagaacgcccttgccttccatcaccggtttgcctgccagcgcgccaatgttgcctaaccccagcaccgccgtaccgttagagatcaccgccaccaggttacctcgggcggtatatttgtaggcttttaacgggtctttttcgatttcaagacaaggtgcggcaacgcctggactgtaggccagcgccagatcgcgctgtgttgccagaggcttggttggagaaacctggattttccctggaactggaaattcatggaaatcaagtgcactttgttttaactggtcatccatttggttgttcctttcacgtaacgttcacaaataaagtgtgtgggcaacagcccctgcccacaacgtggcgcacattattaccctgccggagtctacagactttgagcaagtccaaactctcaccattaatataatgttttggtaataatcctataacactgatgttacctgcttaatccagcaataccatgcctgtctgctatgcttttttgatgcgtttagcgaaatttctcagaagtgtgaattaacgcactcatctaacactttacttttcaaggagtatttcctatgaacgagttagacggcatcaaacagttcaccactgtcgtggcagacagcggcgatattgagtccattcgccattatcatccccaggatgccaccaccaatcctagcctgttactcaaagctgccggattaagtcaatatgagcatttaatagacgatgctatcgcctggggtaaaaaaaatggcaagacccaggaacaacaggtggtcgcagcgtgtgacaaactggcggtcaatttcggtgctgaaatcctcaaaatcgtacccggtcgcgtgagtacagaagttgatgcacgcctctcttttgataaagaaaagagtattgagaaggcgcgccatctggtggacttgtatcagcaacaaggcgttgagaaaagtcgcattctgatcaagctggctagcacctgggaaggaattcgcgcggcagaagagctggaaaaagaaggtattaactgcaacctgacgctgctgttttcttttgcacaggcacgggcctgtgcggaagcaggcgtttttctgattagcccgtttgtcgggcgtatttatgactggtatcaggcacgcaagccgatggacccgtatgtggtggaagaagatccgggcgttaaaagcgtgcgcaatatctacgactactataagcaacaccactatgaaaccattgtgatgggcgcgagcttccgtcgcaccgaacaaatcctcgccttaaccggctgcgatcgactgactatcgcaccgaatttactgaaggagctgcaggaaaaagttagcccagtggtacgtaaattaatcccaccttctcagacgttcccacgcccagctcccatgagcgaagcggagttccgttgggagcacaatcaggatgcgatggcggtagaaaaactgtctgaaggcattcgtctgttcgccgttgatcaacgcaaactggaagatcttcttgccgccaaactataaaccagccacggagtgttatatgtcccgaaaagaccttgccaatgcgattcgcgcactcagtatggatgcggtacaaaaagccaactctggtcatcccggcgcgccgatgggcatggctgatattgccgaagtgctgtggaacgattttcttaaacataaccctaccgacccaacctggtatgatcgcgaccgctttattctttccaacggtcacgcgagcatgctgctctacagtttgctacatctgaccggttacgacctgccgctggaagaactgaagaacttccgtcagttgcatagcaaaaccccaggccacccggagattggctatacgccaggcgttgaaaccaccaccggcccgcttggacaaggtttggcgaacgccgtcgggctggcgatagcagagcgtacactggcggcgcagtttaaccagccagaccatgagatcgtcgatcacttcacctatgtgtttatgggcgacggctgcctgatggaaggtatttcccacgaagtctgtagcctggcaggcacgctgggactgggcaagctgattggtttttacgatcacaacggtatttccatcgacggtgaaacagaaggctggtttaccgacgatacggcaaaacgttttgaagcctatcactggcatgtgatccatgaaatcgacggtcacgatccgcaggcggtgaaggaagcgatccttgaagcgcaaagcgtgaaagataagccgagcctgattatctgccgtacggtgattggctttggtagcccgaataaagcaggtaaggaagaggcgcacggcgcaccactgggggaagaagaagtggcgctggcacggcaaaaactgggctggcaccatccgccatttgagatccctaaagagatttatcacgcctgggatgcccgtgaaaaaggcgaaaaagcgcagcagagctggaatgagaagtttgccgcctataaaaaggctcatccgcaactggcagaagagtttacccgacggatgagcggtggtttaccgaaggactgggagaaaacgactcagaaatatatcaatgagttacaggcaaatccggcgaaaatcgctacccgtaaggctagccaaaatacgcttaacgcttacgggccgatgctgcctgagttgctcggcggtagcgcggatctggctcccagcaacctgaccatctggaaaggttctgttagcctgaaggaagatccagcgggcaactacattcactacggggtgcgtgaatttggcatgaccgctatcgccaacggcatcgcgcaccacggcggctttgtgccgtataccgcgacgttcctgatgtttgttgaatacgcccgtaacgccgcgcggatggcggcactgatgaaagcgcggcagattatggtttatacccacgacagtattggcctgggcgaagatggtccgacgcaccaggctgttgagcaactggccagcctgcgcttaacgccaaatttcagcacctggcgaccgtgcgatcaggtggaagcggcggtgggctggaagctggcggttgagcgccacaacggaccgacggcactgatcctcagtaggcagaatctggcccaggtggaacgtacgccggatcaggttaaagagattgctcgtggcggttatgtgctgaaagacagcggcggtaagccagatattattctgattgccaccggtagtgagatggaaattaccctgcaagcggcagagaaattagcaggagaaggtcgcaatgtacgcgtagtttccctgcccagcaccgatattttcgacgcccaggatgaggaatatcgggagagcgtgttgccttctaacgttgcggctcgcgtggcggtggaagcaggtattgccgattactggtacaagtatgttggtctgaaaggggcaattgtcgggatgacgggttacggggaatctgctccggcggataagctgttcccgttctttggctttaccgccgagaatattgtggcaaaagcgcataaggtgctgggagtgaaaggtgcctgatggtgattgccggatgctgattgccggatgcgacgctgacgcgtcttatccggcctacagcgtcttatccggcctacatgtcccgccattttgtttaacgggtgatccacaacgtgggccaggcgtctggcccatgccagttatcgcaggtgggttctgcggcgtaacgcaccaggcgaaaacgctgaccgtcaaagcgccagcgcgcctgaatgccacaatcgcttaatccgcgccctttcgctaaggtcaccagttcacggcttttctcatcaaatgttgcgttcatcagttccagttcattcgtctcctgaccgttgttgaacggcaaacgcaaccgaaccgggcggctagctagtggctttttacggctcacaatccatgccaaatcaatggtgttataggcccctgcctcacagctaatcatcatcagcgctttatcatcagtcagcgcagtgacattcacctcacgacgcaatggatcaaggctgcagcgcagaccattcatccgccagtttccataatccagcaaatcgttgcgttcttcgagactgagtggcgtcggcgttgggttaaccaccgcgacctctttcagcgcaggcgcgggcggtacgctgagcggcggttcgtcccctttcttgatccacgcggtttcactgccaacgcgcttttgctgagcatcaataaacaacaacgctgcttttaagccactcagagaaatggtctgatcgccatcgcgtaaggtgattgccttcccttcctgaatcatctgcaaaaacgcggtgatggttgccgtatcatcggttactaataaccatggactaatccgccacttgtcaccacttaacgccaacggctcgccatctaacagcagccgtggcgctatctccccttcactcgcctccgggctcttcaatccgccgcgctcaatacgtaaaacggcatcggtatgcgccccggcgctgcggctcagggtcatcaccagtccattatgatcgcccgtattacgcgccacgcagaaattttggttattacaggtgacctgccagtcggaaaacgcccgttgcgctggtgccgcccacaccaaagacgtcggcaacaaagcgaaaaaaaagagaaggaaaatgcgatagcgcatggacggtacgaccccagaagttcaaacaaacagcacaagtcgtatcttcgttgcgcaggtagcgcggctcaatcggatttgtcggattgagccaataataaacaacgaaatattattgttatttttcagtccattaaatgactcgtttgcaaatagttaagcaataacaccgtcttaccgtcacgtatctcgccggttttgatcatctccagcgcctggctgaacggcagctcgagcacttcaatatcttcatcttcgacaccgccaccggcgttagcgcgctgattgtcactgtattcggcgataaaaaagtggattagctcagtcacaccgcctgggctcatatacagttcaaataatttgcgcacttcacccacttcatagcccgtctcttcaatcgcttctttgcgaatacacacttccggttcgtcgttatccagcagcccggcgcagctttcaatcagctgcccgctttcattgccattaacccaggtagcgacacggaactgacgaatcagaaccacggtctttttcttcgtgttgtacaggaggatcgtcgcaccattgccgcgatcgtacacttcacgtttatggcggataacttcgccgtctttgcgcgtgagatcgtaagtaatgttgtgcagggtgaaatagttatcggagagaattttgtctttaatgagggtgatttgttgcgtcataccgactccacagcgcgaaatgaacaattatcttacgctgtgaagtcgggtttgtctgcgcaggctatcagtgagatttgacactttttacccccagccagtcaataatcccctgtgccgcatgacgtccttctgccattgcggtaaccaccagatccgcaccacgcacggcgtcaccaccagcgaagattttcggattggtggtctggtaacggtactggctttccacatccgcgatgatgcggccccatttgtctaccgttacaccgtggctctccagccacggcatcccgtgcggattgaagccaaacgccataatcaccgcgtcggctggcatgacaaattcactgccttccaccggcactggacgccgacgcccctgggcatccggctctccaagacgcgtgcgcaggaaacgaatcccgcagacgtgaccttgttcattcagctcaagcgccaccggctggacgttaaattcgaagttggccccctcttcgcgggcgttcttcacttctttcttgctgcctggcatgttagcttcatcacgacgataagcgcaggtgacgttactcgcgccgtggcgcagtgcggtacgcacacagtccatcgcggtgtcgccgccgcccagtaccacgacgttaagtccggcggtattgataaacggctcttccggtagctcttcgagccccatcacctgtttagtgttggcaatgaggaacggcagcgcgtcataaacgcccggcgcatcttcattgggtaaacccgctttcatggaacggtaagtgcctacgccaacgaagaccgcgtcgtattgttccaaaaggctatccaaagagacatctttacccacttcacaattgagttcgaagtgaatccccatcgcgctgaagatttcccgacggcgtgccagcagggatttatccagtttgaaagaaggaatgccgaaagtgagcaagccaccgatttctggatggcgatcgtacaccgtcacccccacgccattgcgggtcagaacatccgcacaggccagccctgccggacctgcaccgataatcgccacccgcttgtccactttggtgacatggcttaagtcaggacgccaacctttcgccaacgcctgatcactaatgtagcgttcaatgttgccgatagttaccgcgccgtgctcatcgcgaatagtacaggcaccttcacacaaacggtcttgcggacaaacgcgtccggtaatttccggcagggtgttggtctggtgagaaagctcgacggcggcgtcgatgtttccggctttcaccagttcaatccactgcggtatatggttatgcagcgggcaggtccattcacaaacgctgtgctcgccgcacttaaggcagcggctggcttcccgttgtgcctggtcggcgcgaaatggcagataaatttcatcaaaaccggttttgcgcgcttcaatcgccagtttatccggctcgccacgcgcgggcgttgcctgcatttgttcgactttactcattaccggcatttcttgcgccgcggtactggcatgccacggttgatgttcctgacgcgcggtgcgcaagcggcgggatttcgccatgccggagagtgcgacgtcagtgaccagttgcagcgcgtccgccgggcaattctcaacacaggcaggaccgttttcgcgccccgcacaaaggtcgcatttatgcgccgtggcttttacttttcctgccgcgacgggtgtcaggacgatttgcatcgtaccaaaaggacaggccaccacgcaggatttacagccaatacacttttgctgattgacctgaatgctgtcatcaacgtggctgattgcgccattagggcagctacgggcgcagggcgcatcttcacaatggtgacaggtcactgcactacgttgctgttgatgtttgataaccgtaattcggggatgaaaatggtgttggctcaggacatgttgctcatcattgtgagccatgacacaggcgatttcacaagcatgacaacccagacattgctgactgttggccataataaaacgattcataacgaccttcttttttggttgtaaaaaccttattctttatatgagtgttgttattacccgacttacaggggaatcggcaatgttcatgtgcccagaataagtaactatttcgctataaactgtggcagatcaaataatcccatcactgactaaattgcgtttcagcgaactggaacattaatgattttttgtggagaagacgcgtgtgattgttaaacgacccgtcagcgccagtctggcccgggcctttttttacattgtgctgctgagcattctttccacgggtatcgctctgctaactctggcgagcagtttgcgcgacgctgaggctatcaatattgccggaagcctgcgtatgcagagttaccgcctgggctacgacttgcaaagtggcagtccacaactcaatgcacatcgccagttatttcagcaggcactgcatagtccggtattaaccaacctcaacgtctggtatgtgccagaagcagtaaaaactcgctatgcgcatctgaatgccaactggctggagatgaataatcggctcagcaagggcgatttgccgtggtatcaggccaatattaataattatgttaatcagatagacctgttcgtactggctttacagcactacgctgaacgcaaaatgctgctggtggtggcgatttccctggctggcggcatcggtattttcacgctggtcttttttactttgcgccgcatacgccatcaggtggttgccccgctgaatcagctggttaccgccagtcagcgtattgaacacgggcagttcgacagcccgccgctggataccaacctgccgaatgagcttggtctgcttgcaaaaacctttaaccagatgagcagcgagctgcataaattgtaccgtagcctggaagcgagtgtagaagaaaagacccgcgatctccacgaggccaagcgtcgtctggaggtgttgtatcagtgtagccaggcgctgaacactagccagattgatgtgcattgtttccgccatattttgcagattgttcgcgacaatgaagcggctgaatatctggagttaaatgtcggtgaaaactggcggattagcgaagggcaaccaaacccggaattgccgatgcagattttaccggtgacaatgcaagagacggtttacggcgaactgcactggcaaaatagtcacgttagtagtagtgaaccgctgcttaacagcgttagcagcatgctgggacgcggtttgtactttaatcaggcgcagaagcattttcagcaattattgttgatggaagaacgtgcgaccatcgcccgcgaattgcacgacagcctggctcaggtactttcttacttacgtatccagttgacgttactgaagcgtagcataccggaagataacgccaccgcacaaagtatcatggccgatttttcccaggcgttgaatgatgcttatcggcagttacgcgagctgttgactactttccgcctgacgctgcagcaggcggatctcccctccgcattgagggaaatgctggatacgttacaaaatcaaaccagcgccaaactgaccctcgactgccgtctgccaaccctggcactggatgcgcaaatgcaggtgcatttgttgcaaattattcgcgaagcggtgctgaatgcgatgaagcacgccaacgccagcgaaatcgccgtcagttgcgtcaccgcgccggacggcaatcacacggtttatatccgtgataacgggattggtatcggtgaaccgaaagaacccgaaggtcattatggtctgaatatcatgcgcgaacgcgcggaacggctaggtgggacgctgacttttagtcaaccttccggcggcggcacgttagtgagtattagctttcgctctgcggagggtgaggaaagtcagttaatgtaatgcctcctactgaccaaagaatacttgcacttaaggttcagtataaaagggcatgataatttacattaactcctttttttctccacgattggctcgtaccttgccgctacagtgaagcaagtcaagcctacaacgatacgcagaaacacgaggtcctcttttaatggcgaatttctttattgatcgccccatttttgcctgggtgctggcaatcctgttgtgtctgacaggtaccctggcgatttttagtttgcccgttgaacaataccccgatctcgcgccaccgaatgtgcgagtgaccgctaactatcccggcgcaagcgcccagacgctggaaaacaccgtgacccaggttatcgagcaaaatatgaccggcctcgataatctcatgtatatgagttctcagagcagtggcaccggtcaggcatctgtcactttaagttttaaagcaggcaccgatccggacgaagccgtgcagcaagtacaaaaccagctgcaaagtgccatgcgaaagttaccgcaggcggtgcaaaatcagggcgtgacggtgcgtaaaaccggcgataccaacattctgaccattgccttcgtctctaccgatggtagcatggataaacaggatattgctgattatgttgccagtaatattcaggacccgttaagccgcgtgaatggcgtcggggatatcgatgcctatggtagccaatattccatgcgtatctggctggacccggcgaaactcaacagtttccagatgacggctaaagatgtcactgatgccattgagagtcagaacgcgcagattgcggttgggcaacttggtggtacaccttccgtcgataagcaggcgctcaacgccaccattaacgcccagagtctgctgcaaacaccagaacagttccgcgatatcaccttgcgggtcaatcaggacggcagtgaggtaaggctgggcgatgtcgccaccgtcgaaatgggggcggagaaatacgattatcttagccgcttcaatggtaagccagcctccgggctgggggtaaaactggcctccggcgctaacgaaatggcgacagcggagctggtgctcaatcgtctcgacgagctggcgcagtatttcccgcatggactggaatacaaggtggcgtatgaaaccaccagctttgttaaagcctccattgaagacgtggtgaaaacgctgctggaagctatcgctctggttttcctcgttatgtatctgttcctgcaaaacttccgcgccacgctgatacccactatcgccgtgccggtggtgttgatgggaaccttctccgtactttacgccttcggttacagcgtcaacaccttaaccatgttcgcgatggtgctggcgatcggtctgctggtggatgacgccatcgtggtggtggaaaacgtcgaacgtattatgagtgaggaaggactcactcctcgcgaagccacacgtaaaagcatggggcagatccagggggcactggtcgggattgcgatggttcttagcgcggtatttgtaccaatggccttcttcggcggcaccaccggtgccatctatcgccagttctctattaccattgttgcggcgatggtgctgagtgtactggtagcgatgatcctcactccggctctgtgtgccacactacttaagccactgaaaaaaggtgagcatcatgggcaaaaaggcttttttgcctggtttaaccagatgtttaaccgcaacgccgaacgctacgaaaaaggggtggcgaaaattctccaccgtagcctgcgctggattgtgatttatgtcctgctgcttggcggcatggtgttcctgttcctgcgtttgccgacgagcttcttaccgctggaagaccgtggcatgtttactaccagcgtacagttgcccagcggtagtacgcaacaacagaccctgaaagtcgttgagcaaatcgagaaatactacttcacccatgaaaaagacaacatcatgagcgtgtttgccaccgttggttctggccctgggggtaacgggcaaaacgtggcgcgaatgtttatccgcctgaaagactggagcgaacgcgacagtaagaccggcaccagctttgccattatcgagcgtgcaacgaaggcgtttaaccaaattaaagaagctcgcgttatcgccagcagcccgccagcaattagcggtcttggtagttctgcaggttttgatatggagttgcaggaccacgctggagcgggtcacgatgcgctgatggcagcacgtaatcagttgctggcgctggcggcggaaaacccggagctaacccgtgtgcgccataacggcctcgacgacagtccgcagttgcagattgatatcgaccagcgtaaagctcaggcgctgggcgttgctatcgacgatattaacgacacactgcaaaccgcctggggtagcagctatgtgaatgactttatggatcgcggtcgcgtgaagaaagtctatgtgcaggcagctgcgccgtatcgcatgctgccagatgacatcaatctctggtatgtccgaaataaagatggcggcatggtgcccttctctgctttcgcgaccagtcgctgggaaacaggcagcccgcgtctggaacgctataacggttattctgcggttgagattgttggggaagccgcaccgggggtcagtaccggtacggcgatggatattatggaaagcttagtgaagcagctgccaaacggctttggtctggagtggacggcgatgagctatcaggagcggctttccggcgcgcaggctccggcgctgtacgccatttccttgctggtggtattcctgtgtctggctgcgttgtatgaaagctggagcgtgccgttcagcgtaatgctggtcgtgccgctgggggtaatcggcgcgctgctggcaacctggatgcgcgggctggaaaacgacgtttacttccaggtgggcctgttaacggtcattggtttaagcgcgaaaaacgccatcctgatcgtcgagtttgctaacgagatgaaccaaaaaggccacgacctgtttgaagcgacgctccacgcctgccgtcagcgtttacgcccgattctgatgaccagcctggcatttatcttcggcgtattgccaatggcaaccagcacgggtgccggttccggtggtcagcatgcggtgggtactggcgtaatgggcgggatgattagcgccactattctggctatttacttcgtgccgctgttctttgtgctggtgcgccgccgcttcccgctgaagccgcgcccggaataagcaataaaaaaggcgacatgccaatgtgtcgcctttttcaactttccgattaagaacctgctcagcgggttcttgctgtttgtactttgtctcaggaattacttacgaagcataacttcgataaagtctttccagttccccagttcacgttcaatcataacaacctctcttataattatgggtattctacggaaacaatataccgtggtgaagctaatttactcgattgctgcgatgactacctccgggggacaaatcttatgtaaatactatggtcctgcggtgatgatttgtatgtgatacacagcaacatttcgagatattcatacggcatctaatactgatttaattctggttaaaatacagacagataacaagatgaatattcttaatgtttacgttaaaaatgtttaatattatttaatagttgttaatttgaatacttcgataatgttatatttcctgataatcatttgcaggcaaaatgttttcacccttaaatgagtatttattctcataaatcgaaaaaggattcattatggttacactttacggtatcaaaaattgtgacaccattaaaaaggctcgccgttggctggaagccaataacatcgactatcgttttcatgattaccgcgtcgatgggctggacagcgaattattgaacgattttatcaacgaattaggctgggaagcgttactcaacacccgtggtacaacctggcgtaaactggacgaaaccacccgcaataaaatcaccgatgcggcctctgcggcggcattaatgactgaaatgcctgcaattatcaaacgtccattgctctgcgtgcccggtaagcctatgctgctgggtttcagtgattccagttatcagcaatttttccatgaggtgtaatctatgagctgcccggttattgagctgacacaacagcttattcgccgcccttccctgagtcctgatgatgcaggatgccaggctttgttgattgaacgtttgcaggcgatcggttttaccgttgaacgcatggactttgccgatacgcagaatttttgggcatggcgtgggcagggtgaaacgttagcctttgccgggcataccgacgtggtgccgcctggcgacgccgatcgttggatcaatcccccgtttgaacccaccattcgtgacggcatgttattcgggcgcggtgcggcagatatgaaaggcagcctggcggcgatggtggtggcggcagaacgttttgtcgcacaacatcccaaccatacggggcgactggcatttctgatcacctctgatgaagaagccagtgcccacaacggtacggtaaaagtcgtcgaagcgttaatggcacgtaatgagcgtctcgattactgcctggttggcgaaccgagcagtatcgaagtggtaggtgatgtggtgaaaaatggtcgtcgcggaagtttaacctgcaaccttaccattcatggcgttcaggggcatgttgcctacccacatctggctgacaatccggtacatcgcgcagcacctttccttaatgaattagtggctattgagtgggatcagggcaatgaattcttcccggcgaccagtatgcagattgccaatattcaggcgggaacgggcagtaacaacgttattccgggtgaactgtttgtgcagtttaacttccgcttcagcaccgaactgactgatgagatgatcaaagcgcaggtgcttgccctgcttgaaaaacatcaactgcgctatacggtggattggtggctttccgggcagccatttttgaccgcgcgcggtaaactggtggatgcggtcgttaacgcggttgagcactataatgaaattaaaccgcagctactgaccacaggcggaacgtccgacgggcgctttattgcccgcatgggggcgcaggtggtggaactcgggccggtcaatgccactattcataaaattaatgaatgtgtgaacgctgccgacctgcagctacttgcccgtatgtatcaacgtatcatggaacagctcgtcgcctgatgagtggttctgcaagaggaaataagcatggactggctggctaaatattggtggattctggtgattgtctttttggtaggcgtcctgctgaacgtgattaaagatctcaagcgcgtcgaccataagaaatttctcgccaacaagccggagcttcccccgcatcgtgatttcaacgataagtgggacgatgacgacgactggccgaaaaaggatcaaccgaagaagtaagctgagtgctcaaccgtaggccggataaggcgttaacgccgcatccggcaatggtgaacgatgcctgatgcgacgctcacgcgtcttatcaggccaggtaatctgtcttttacatcatttcaatcacatcatcatcgccaggcttaccgccacttagcgcttcgtcgaaataatgtttcggaatggtataacgcaagtgatccagggcaaattgcatactgcgattgtcgatcgcatggcctaaatcctccacgatatccagcgtcacgtcaccaccggcactgattaacgcttcctgcgccgcaaccgcatgcgccagatcgataaccggatcttcaccgccatgaatcaggtgaattgtcgtggctgtagacgcagtttccggcaggctcgcatagcgtccgttaaaagcaatgacgcgactagcaaggcccggttcggctttaatgctctccagcaccataatcgcgccttgagagaaaccgatgagcgccgtggcgttagcccctactccgctctgtttctgccagtagcgcaccgtttcaataaacgtcggcatgatcgcatccacacgcgcctggcgattatcttccgtaataccctgcacgctaaaccactgacgccccgccggattaccgctcggctccgcgccaccgacactcaccaccagcgcatcaggaaacagcggtgcaaaccagttgcctatttcccccattgccaccgggttatccccgacaccgtggaaaagcagtaacaactgttgcgcaggtttatccgggctttgaacaacaaaatggtcatgtttcatggcgaactccttaactgatgtcattaattttacgccgctgactcacaatgaccatgagataaaattgaaggagtcagtgaaataattgccattgcgttatgcgatcgcgcagacgctcagtgcgaacatcattaagtgcgaacagcgcctgcgcggcctcttcccgctgacggaccagtaacatcttgcggccactaagtttaagtgtggtacataactgcgcatcactggcgtttttctgtaaacgcccacgcagcgccggtaatgccagttcactggtttgtaacagacgcaataagcaacctaagctcgttaatagcggacgatgagcgaaagcaaaaccggccagttcaagccagtcgtcgtcagaaaggacggcatcgtttagtggatcaacaggaagcgtttcgccattccactgcgcgagagcttgcgcatcgcgacgtaaacggtaatgctcacgttcagccagctgtttacccgcatcactcatcggtaacagcgccatcgccgtatagcaaccgctgctggcttcccgatgattacccatccgcaccagcacaaaaccgcagcgttgccagaaacgccataactccccggtgtaaccaaaactcacgctaagatagtcgaggtcttgcgtatattgcaaagcaccagcaataagttgccgccctgtgccttcccgctgacgagccggatgaactgctatccggctgacccgccgtccacgcaatgtcgccgccagtggattgttgccgtgcgccgccaggctctgggccaccagattaccccgcgggcgacgaaaacctgcccataccgcctgactgagttgttgagataatccaccctcatccaccagccacagcgccccggcaatctcgttttcgccagccgcctgtaaaaaatgttgccctggtgcatccatcatccggcgtaaatccagcgggctagtccgatagtgcgcaccagacaagagctgataaacctttaacggcgtttctggatcgctttgccataacgtctgttcaaatgcggaaatgacaatattgccttgtggtgtatgggtgaagttttcatcgtcaaaaaccagtgcctcgctgaccattttttccagcgggcatccctgcgcccagcggatcggctgttgcagttcaaaacggtgtaaatgcggaaagcgagcgcaaaatttcagcaaaaaaccacgtccggtgccttcgtagccctgcaccgtagtggttaacaacgttcgaggaaaacggcttaccagttgatgcaacaatggcgcaggtatggctgcggcttcatcgaccaccagccagtcggcttgctcatcgctggctaacaaggcatccggcgcaataaagcgaaacttctcgcccgcaaattgtgccagtacatccgtactcgcttttgcgggcgcggtgacaatcgctctgcccgcaatacgagaaatgagttgccctgccaacgcgctcttaccgcgcccacgcgcagccgttaccgctgccacgcccggcggcatggtcattagctgctttaagagttgctgttgttctggttgtggtgcgccagtcgcggggtaccagtcagtacggggagtaaaatgcgccaagctgaatggctggttttgccgccagaggatagcctcgttatccgccgtaagtacgcgtttgagatgctggacaaaatgcggcgtcgcaatagggtcagggcaatcactccagcgcaggctgtcggcatcaggttggttttcccactcttcccatacagggagtaacaaaaccagccagcttcccgctttcaacgttccgctaagtgcggcaaaggcagcggcatcaaagccgtggcgggcgtcgaataccgcatgccggaactcgcgcccaagtaaagtttgtagtgcgctgggagaacagtggttttcagcatctggccgcgggctaatccacagccagtcgccaggtaaggcatcacgcaacttaagagtatgctcaaaacaccaaccctcttccccgctcaacaccagcaagcggcggatcccttcacgtttcatttgcgctgttaatgtgtgaagcgcagtcagttcagccatccctgccccggaagttaaatgcttttaccaaaagtattgcattgtgccggatcgccgctgtcgaaaccacgtttaaaccagctgtagcgttgctgagaagtgccatgagtgaaactgtctggtactactcgcccctgactttgctgttgtaaacggtcatcgccgatggcctgcgccgcgttcagcgcctcttccagatcgccggtttccagaacgccttgctgctgcatactatgcccccagacaccggcaaaacagtcggcctggagttccatacgcacagataagcggtttacttccgcctgcgtcgcgttttgttgcagttgacgaactttcggctcgatgcctaacagtttctgcacatgatgaccgacttcatgggcgataacgtacccctgggcaaaatcgccatccgcgccaagtttgtctttcatgtcatcatagaaggagagatcgatataaaccgtgccatccgccgggcaatagaacggccccattatggactggcccgccccgcagccggtacgcgtcattccacggtacatgaccagcttcggttgctgataggtcttacccatcttctcgaactgttgtccccaggtgtcttccgtggttgccagaatcacgctggtgaattttgcggcttcgtcttcatttgggctaatactccgcgtactttgttgttgggaaaccggctgcccggtcatcaacccggttaaatcaacaccatagtagcctgcaaccagcacgactatcagtaaaatcagcccgcctttaccgcttggcaggcgaaaaccgggaccgcccatagatggaccaccagagctgttgcgcctgtcttcaacattgtcactttcacgtcgcccttgccaacgcatagatacctcaacaatatattcattatagaaatgatcgtaggtggttcagaggaagattaccacaggaaagcgggatgaaatggcggaggaatgagcgttcaatgcatatattccgagagcggttgtcttgccgtgccagctgcacggcaagatgatgaacagaaaaatcagtccagctgtacacccaggcggcgggcgacggcttcataggcttcgatcaggccaccgaggctctggcggaaacggtctttgtccattttctccagcgtttctttgtcccacaggcggctaccgtccggggagaactcatcacccagtaccacttcgcctttgtacagaccaaattccagcttgaagtcgaccagaatcagaccagcatcatcgaacagttttttcagcacgtcgttcgctttgtaggtcagctctttcatacgcgccaggttctctttgctcacccagccaaaggtttcgcagtaagattcgttgaccatcggatcgtgcatggcgtcgtttttcaggaacagatcgaacagcggcgggttcagctcaataccttcttcgattccaagacgtttcaccagagagccagcagcacggttacgcacgacacactcaaccggcaccatatccagctttttcaccagacattcggtatcggagagcagacgctccatttgagtcgggatacccgcttcagccagtttgctcataatgaagtagttgaacttgttgttcaccatacctttgcgatcaaactgctcaatgcgcgcgccatcccctgcactcgtatcattgcggaattcgagcaccaacaggtccgggttttccgtgctgtatacggttttcgctttaccacgatacaactcagcttgcttttgcatctttatcactcctgggtgtgaattaacgttttaaaatcttttgctgtctggtgtgccggatgttttgtcggatgcggcgtgaacgccttatccgaactacgtccgacaaacaaatttcgtgcgaattaccgctaaaatcgcgttttcctgcagacgcacacgtttgcgtatcatatcagaaaaaagggccggatgattccagccctgtatttttacttgctaaacgcagcctggaagacagctaccagcgcgtcgttctgactctgagtcagagtatgacctttcggatcgatgaactgtaggctgctgcggttatctaaatcgccaacctgcagtttatagtcaccggatgccaggcctggatcgctcgcgcccagttcctgccagtcgctgtcagacagcggcttataagttacggccatgttgccctggctacgggtgctgtcggtcactttcatgcccactttttccagcgccgctggcagacgttgccaaaccacattgaacggcccgcgtacgaccagcattggtaaaccggtgtcatcagctgcactttgtacgtccatagtggtggaggcacgattttgcgcagcgttcgcggcgtcagtggcagatttatccagaccggcggaaataacgttcatcatctccgtgctgtaacgctgcatggaagccgcgtctgcaaccggtttgcccgcctgttccaggttcagcagtttaaccgtaaccgcctgctgataaccctgcggcttaacagagatttgataacgaccacgatactgctcgtcttcgtccagacggttccattgtacccaatcggtggtcagtgtctgaccagcatcatcacgttgggtgatggtgtagtttttcgcctgcagcacgctaaccacctgcggccacagagtattgccacgaccattttccaccagcaaactagcggtatcgcccgtgaactgggtacgcgcgccagaaaccagtgccagcggctgggctggtggacgaatgtccagcgccttaccgacagcaccactaccgttggtcaccgggattgcataatcaccggaggtcaccggcaaaatcattccagccggggcatgaagctccgcaagcggtgccgcttccaggtaggcttcatcaccactgacctgacgcttatagcgactgtcagaactacaggcagcgagtaataaaacaaggctaacacccgcaacctttgccaggcggctcttttgaacagagtaagccatcaaatctccctaaactttacagcaaaccggcatgcttaagcgccgctctgaccgtctcacgaccactgtcggtgattggtgtcattggcaggcgcagcgtatcggtcgccacaagacccagttccttacatgcccatttcaccgggattggattgggttcgacaaatagtttgttgtgtaatggcatcagacgctgattaataacgcgtgcctcggcaaaatgcccttctgctgccagtttgcacatctgggccatatcacgcgctgcgacgttagccgtaacggaaataaccccatgaccgcccaattgcatgaagtccagcgcgctcgcatcatcgccgctcagcagaacaaaatcatcactaaccagctctttgatctggtttacacgcgttaagttccctgttgcctctttgattccgataatattttttactttcgccagacggcccaccgtttccgggagcagatcgcagccagtacgggacggcacattatacagaatttgcggcaggtcagtatgctcagcgatggctttgaaatgctgatacaaaccttcttggctcggacgattgtagtaaggggttaccgtcaggcagccgacgataccactgtcattgaagcgctgcgtcaggctaatggcttccgcagtagcgttagcgccggtcccggcaattaccggaatgcgcccatcagccagatccagcgtcatcatcaccacatcagcatgttcgtcatgatttaaggtagcggactcgccagtggtgccaacagaaacgatcgcgctagtaccgctggcgacatgataatcaatcagttttttcaagctagcccgacagacattacctttttcatccatcggagtaacaatcgcgacaatacttcccgtgaacatgggccatcctctgtgcaaacaagtgtctcaatggtacgtttggtatggcattaaaagcaagcagacagaaccgttctgattgttgtatgcatgtttttttatgctttccttaagaacaactcaccccttaaaggaataaccagtttgacactgagtagccaacattatctggtgatcactgcgttgggtgccgatcgccctggaattgtgaacaccatcacccgtcatgtcagtagttgcggctgtaatattgaagacagtcgcctggcgatgctgggagaagagttcacgtttattatgctgctttccggtagttggaatgccattactctgattgaaagtacgttaccgttgaaaggtgccgaactggatcttttaatcgtgatgaagcgcacgacggcgcgtccgcgtccgccaatgccagcatctgtctgggttcaggtcgatgtggcagactccccgcatttaattgaacgcttcacagcacttttcgacgcgcatcatatgaacattgcggagctggtgagccgcacgcaacctgctgaaaatgaacgggctgcgcagttgcatattcagataaccgcccacagccccgcatctgcggacgcagcaaatattgagcaagcgttcaaagccctatgtacagaactcaatgcacaaggcagtattaacgtcgtcaattattcccaacatgatgaacaggatggagttaagtaatgaatccactgaaagccggtgatatcgcaccgaaatttagcttgccggatcaagacggagaacaagttaatttgaccgacttccagggacagcgtgttctggtttatttctacccgaaagccatgacccccggctgtaccgtacaggcctgcggcttacgcgataacatggatgagttgaaaaaagcgggcgttgatgtgctgggtatcagcaccgataaacccgaaaaactctcccgttttgcggaaaaagagctgcttaactttacgctcctgtctgatgaggaccaccaggtgtgcgaacaattcggcgtctggggtgaaaagtccttcatgggcaaaacctacgatggcattcatcgcatcagcttcctgattgacgctgatggcaaaatcgaacatgtctttgacgatttcaaaaccagcaatcaccacgacgttgtgctgaactggctgaaagaacacgcctgattactttgctccattccgtgctggctgcgcttgcggccagcatacctcacttctcgtgatcaagatcacattctcgctttcccctgcgacacgggtgtcgaatccattttttgctgaacgttaatgaccatcatttttgtaccgttcagaatccagttaatacataacttattgaatatattgagttaatcagaatggcatcctttatgcaatatgaaatgcaatgtttcatatcattttcaaggagccgacatgaaccgctttgtggtggccgaaccactgtggtgtacaggatgtaatacctgtctcgctgcctgtagcgacgtgcataaaacgcaaggtttacagcaacacccgcgcctggccctggcgaagacgagtacaatcactgcccctgtcgtgtgtcatcactgtgaggaagccccttgcctgcaggtctgcccggtcaatgccatctctcagagggatgatgcgatccaactcaacgaaagcctctgtattggctgcaagctttgcgccgtggtctgcccatttggcgcaatcagcgctagtggaagccgtccggtgaatgcccatgcgcaatatgtttttcaggctgaaggcagtctcaaagacggcgaagaaaacgcgccaacacaacatgctttgctgcgctgggaacctggtgtccagaccgtcgcggtgaaatgcgacctgtgtgatttcttgccagaaggtccggcctgcgttcgcgcttgcccgaatcaggcgttacggctgatcaccggtgatagcctgcaacgtcagatgaaagaaaaacagcgccttgccgcaagctggtttgccaatggcggggaggatcccctttccctcactcaggagcaacgctaatggatgccctgcaattattaacctggagcctgattctctatctgtttgctagtctggctagcctgtttttactcggcctggacagactggctattaagctttccggcatcacaagcctggtgggcggcgtgattggcatcatcagcggaattacgcaattacatgctggtgtaactttagtcgcccgttttgcccccccttttgaatttgccgatttaaccctgcgaatggatagcctcagcgcatttatggtgctggttatctccttgctggtggtggtttgttctctctatagtttgacttatatgcgcgaatacgagggcaaaggcgcggcggcgatgggcttctttatgaatattttcatcgcaagcatggttgccctgctggtgatggacaacgctttttggttcatcgtgctgtttgaaatgatgagcctgtcttcctggtttctggtcattgccaggcaggataaaacgagcatcaacgctggcatgctctacttttttatcgcccacgccggaagcgtgctgataatgatcgccttcttgctgatggggcgcgaaagcggcagcctcgattttgccagtttccgcacgcttagtctttctccggggctggcgagcgcggtgttcctgctggcctttttcggttttggcgcgaaagccgggatgatgccgttgcacagctggttgccgcgcgctcaccctgccgcaccaagccacgctagcgcgttgatgtctggcgtaatggtcaaaataggtattttcggcatcctgaaagtagcgatggatctgctggcgcaaacgggtttgcctctgtggtggggcattctggtgatggcgatcggcgcaatctccgcgctcctgggcgtgctatatgcgctggcggaacaggatatcaaacggctgctggcctggagtaccgtcgaaaacgtcggcattattttgctggcagtcggtgtggcgatggtcggtctgagtctgcacgacccgctgctcaccgtggttggactgctcggcgcactgtttcatctgctcaaccatgcgctgttcaaagggctgctatttctcggcgcgggagcgattattagccgtttgcatacccacgacatggaaaaaatgggggcactagcgaaacggatgccgtggacagccgcagcatgcctgattggttgcctcgcgataagcgccattcctccgctgaatggttttatcagcgaatggtacacctggcagagcctgttcagtctaagtcgtgtggaagccgtagcgctacaacttgcgggtcctattgctatggtaatgctggcagtcactggtgggctggcagtaatgtgcttcgtaaaaatgtacggtattactttctgtggtgcgccgcgcagtacacacgctgaagaggcacaggaagtgccaaatacgatgatcgtcgccatgctactgctcgcggcactctgcgtattaattgcgcttagtgccagttggctggcaccgaagataatgcatattgcccatgcgtttaccaatacccctcccgccactgtcgccagcggaatagcacttgtacccggcacgtttcatacacaggtcacccccagtttactgttgctgttactactggcgatgcctttgctgcctggcctttactggctgtggtgtcgtagccgccgcgcagcgtttcgtcgcacaggagatgcctgggcatgcggctacggctgggaaaatgcgatggccccgagtggcaatggcgtgatgcagccgctgcgtgtggtcttttctgcgctatttcgtctacgacaacagctcgaccctacgctgaggctaaataaaggtcttgcgcacgtcaccgccagggctcagagcacagaacccttctgggatgagcgggtgatccgccccatcgtgagcgccacccaacggctggccaaagaaatacagcatctgcaaagcggcgactttcgtctctattgcctgtatgtggtcgccgcactggttgtgctgctaatcgctattgccgtctaaggaaatcaccatgagacaaactctttgcgacggatatctggtcatttttgcgttagcacaggccgtgattctgctgatgctaaccccactttttacgggtatttcccggcagatacgcgcgcgtatgcactcccgccgcgggccggggatctggcaggattatcgcgatatccacaaactgtttaaacgccaggaagttgcgccgacatctagtggtctgatgttccgcctgatgccgtgggtattaatcagcagcatgctggtgctggcgatggccttaccactgtttattaccgtttccccttttgcgggcggcggcgatctgatcacccttatctatcttcttgccctgtttcgttttttctttgctctttccgggctggataccggaagtccgtttgcgggagtcggtgccagtcgcgagttgacgctcggcattctggtcgaaccaatgcttattctcagtctgctggtattggcgctgatagcaggttccacgcatatcgagatgatcagcaatacgctggcgatgggctggaacagcccgctaaccaccgtactggcgttactggcctgtggttttgcctgcttcattgagatgggaaaaattccctttgatgttgctgaagcagaacaggaattacaggaaggcccgctgaccgaatattccggtgccgggctggcgctagcgaaatgggggctggggctgaaacaggtcgtgatggcaagtctgtttgtggccctgtttctgccctttgggcgcgcgcaagaactttctctcgcctgcctgctgactagtcttgtcgttacgctgctcaaggttttgctgatttttgtactggccagtatcgcagaaaacacgctggcacgcgggcgttttttactcattcaccatgtgacctggcttggcttcagccttgctgcgcttgcatgggtcttctggttaaccggtctgtaaggagcactgacggaatatggaaaatcttgctctgacgacgttattgctgccttttatcggcgcactggtcgttagctttagcccacaacgtcgggccgccgaatggggggttttgttcgccgcgctgaccacgctgtgcatgttgagtctgatctccgcgttttatcaggccgataaagttgccgtcacgttgacgttggtcaacgtgggggatgtggcgttgtttggcctggtcattgatcgcgtgagtacgctgattctgtttgtggtggtgtttctcggtttgctggtcacgatctactccacgggttatctgacggataaaaatcgcgaacacccgcataacggcacgaatcgttattacgcatttttactggtgtttatcggcgcgatggcgggactggtactctccagcacgctgctcggtcagttgttgttttttgaaattacaggcggctgctcctgggcgttgatcagttattaccagagcgataaagcgcagcgtagtgcactaaaagcgttacttatcactcatatcggcagcttggggttgtatcttgccgccgccacgctgtttttgcagaccggaacgtttgcgcttagcgcgatgagcgagttacacggcgacgcacgttatctggtttatggcggcatcctgtttgccgcgtgggggaaaagcgcccagctaccgatgcaagcgtggctaccggacgcaatggaagcgccaacaccgatcagcgcctatctccacgccgcaagcatggtgaaagtgggcgtttacatttttgcccgcgctattatcgacggcggcaatatcccgcatgtgattggcggcgttggcatggtcatggcactggtcaccattctttatggctttctgatgtatttgccacagcaggatatgaagcggttgctagcctggagcaccatcactcaacttggctggatgttcttcggcttgagcctctccatcttcggcagccggctggcgctggagggcagcatcgcctacatcgtcaaccacgcgttcgctaaaagcctgtttttccttgtagcaggtgcgctgagttacagctgcggcacgcgcttgttgccgcgtctgcgtggcgtattgcacaccctgccgttgccaggcgtgggtttctgcgtggcagcgctggcgattaccggcgtgccgccgttcaacggcttcttcagtaaattcccgctgtttgctgccggttttgcgttgagtgtggagtactggatcctgctgcccgccatgattcttctgatgattgaaagcgtcgccagtttcgcctggtttattcgctggtttggtcgcgttgtgcctggcaaaccgagcgaggccgtcgccgatgccgcaccgctgccaggaagtatgcgcctggtgttgattgtactgattgtgatgagcctgatttccagcgtaatcgccgcgacctggttgcagtaaggagatgatgaatgaccggttctatgatcgtaaataatctggcgggactgatgatgctgacaagcctgtttgtgattagcgtcaaaagctatcgcctgagttgcggattttacgcctgccagagtctggtgctggtgtctattttcgccactctcagctgcctgttcgccgcagagcaactgctgatctggtccgccagcgcctttatcaccaaagtgctgctggtaccgttaatcatgacttacgctgcacgaaatattccccagaacatcccggaaaaagcgttattcggtccggcaatgatggcactgctcgcggcgttaattgtcctgctttgcgcatttgtcgttcagcccgtgaagctaccgatggctaccgggctgaaaccggcgctggcggtagcgttaggtcattttctgcttggcctgctgtgcattgtcagccagcgcaatatcctgcggcaaatttttggttactgcctgatggaaaacggctcccatctggtgctggcgcttcttgcctggcgagcaccggaactggtggaaataggtatcgctaccgacgccatcttcgccgtcattgtgatggtgttactggcaagaaaaatatggcgtacccacggcacgctggacgtgaacaacttgaccgcgctgaagggataatgagatgagttattctgtgatgttcgctttactcctgctcacgccgctgctttttagcctgctctgttttgcctgccggaaacggagactttctgcgactcgcacggtgaccgtattacatagcttagggatcacactgctgctgattctggcactctgggtggtccaaactgccgctgatgcaggagaaatattcgctgcgggactgtggcttcatattgatggtctgggcggtttgttcctcgccattcttggtgtgattggctttctcaccggtatttacagcattggctacatgcgtcatgaagtggcacacggcgagcttagtcccgttacgctgtgcgattactacggtttcttccatctgtttttgttcaccatgctgctggttgttaccagcaataacctgattgtgatgtgggcggcgatcgaagccaccaccttaagcagcgcgtttctggtaggcatttacggtcagcgtagtagcctggaagctgcatggaagtacatcattatttgtactgttggtgtcgcttttggtctgttcggtaccgtgctggtatacgccaacgccgccagcgttatgccgcaggcagaaatggcgatattctggagcgaggttcttaagcaaagctccttgcttgacccaacattaatgctgttggcctttgtgtttttgctaattggctttggtaccaaaaccgggctatttcccatgcacgcctggctgccggatgctcacagtgaagcgccgagtccggtcagcgccctgctctccgccgtattgctgaactgcgcgctgttggtgctgattcgctattacatcattatttgccaagccatcggcagcgatttccccaaccggttgttgctcatcttcggcatgttgagcgttgccgtggcggcatttttcattctggtacagcgggacattaagcgtctgctggcgtactccagcgtggagaacatggggctggtcgcggtggagctaggcattggcgggccgctgggaatttttgccgcgctgctgcacatcttaaaccacagtctggcaaaaacgctgctgttctgcggttccggcaatgtactgctcaagtacggcacgcgcgatctcaacgtcgtctgtgggatgctcaaaatcatgccatttaccgccgtgctgtttggcggcggtgcgctggcgctggcagggatgccgcccttcaacatttttcttagcgaatttatgaccattaccgccggactggcacgtaatcacctgctgattatcgtcctgctgttattgctgttaacgctggtgctggcgggcctggtacggatggctgcgcgggtgttaatggcgaaaccgccgcaggccgttaaccggggtgatctcggctggttgaccaccagcccaatggtgattctgctggtcatgatgctggcgatgggaacgcatattccacaacctgtcatcaggatcctggcgggcgcttccactatagtcctcagtgggacgcacgatctgcctgcacaacgtagcacctggcatgattttttgcctagtggcaccgcatctgttagcgagaaacacagtgaacgttaatagtagcagtaatcgtggcgaagcgattctcgccgccctgaaaacgcagttccccggcgcggtgctggatgaagagcgacaaacgcctgaacaggtcaccattacggtgaaaatcaatctgctgcctgacgttgtacagtatctttattatcaacatgatggctggcttccggtcctgtttggcaacgacgagcggacacttaacggtcattacgcggtttattatgcccttagtatggaaggggccgaaaaatgctggattgtggtgaaggcgctggtcgatgccgacagtcgggagtttccgagtgtcacaccgcgcgtccctgccgcggtctggggcgagcgagaaattcgcgatatgtacgggctgattccggttggcctgccggatcagcgtcgcctggtgttgcccgatgactggccggaagatatgcatccgctgcgcaaagatgcgatggattatcgactgcgccctgaaccgacgactgattccgaaacgtatccgtttatcaatgagggcaacagcgatgcgcgggtgatccctgtcggcccgctgcatatcacctccgatgaaccgggtcacttccgcttgtttgtggatggcgagcaaattgtcgatgctgattaccgcctgttttatgtccatcgcggcatggagaaactggcagaaacgcggatgggctacaacgaagtgaccttcttaagcgaccgcgtgtgtgggatttgcggttttgcccacagtgtggcctataccaatagcgttgaaaatgcactggggattgaggtgccgcaacgagcacatactattcgcagcattctgctggaagtcgaacggctacacagtcatttgcttaaccttggcctctcctgccatttcgttggttttgataccggctttatgcaatttttccgcgtgcgggaaaagagcatgacgatggcggaattgctgatcgggagccgtaaaacctacggtctgaatctgattggtggtgttcgccgcgatattctcaaagagcaacgtctgcaaacgctgaaactggtgcgcgagatgcgcgccgacgtgagcgagctggtagagatgctgcttgctacgccgaatatggaacaacgcactcagggcattggcattctcgaccgacaaatcgcccgtgatttgcgctttgatcacccctacgccgactacggcaatattccaaaaacactgtttacctttaccggcggcgatgttttctcccgcgtgatggtccgtgtcaaagagacgtttgatagcctggcaatgctggaatttgccctcgacaacatgccggataccccactgctgaccgaaggctttagctataaacctcacgcattcgcgctgggctttgttgaagcgccacgcggtgaagacgtgcactggagcatgctcggtgataaccaaaaattgttccgctggcgctgccgtgccgccacctacgccaactggccggtgttgcgttacatgctgcgcggcaataccgtttctgacgcaccgctgattatcggtagccttgatccctgctactcctgtaccgaccgtgtgacgctggtagatgtgcgcaagcgccagagtaaaaccgtgccgtataaagagatcgaacgctacggcattgatcgtaaccgtagcccgctgaagtaaggacagaagatgctgaagttactgaaaactattatgcgcgccggaaccgcgacggtgaaatatcccttcgcgccactggaggtcagccctggctttcgcggaaaaccggacctgatgcccagccaatgtattgcctgcggtgcctgcgcctgtgcttgtccggcaaatgcgctggctatccagaccgacgaccagcaaaatagccgcacctggcagctctatctggggcgttgtatttactgcggacgttgtgaagaagtgtgcccgaccagagccatccagcttaccaataactttgaactgaccgtcaccaataaagccgatctctatacccgcgcgacgttccatctacaacgttgcagccgttgcgaacgcccgtttgccccgcaaaaaaccatcgcactggctgctgaattgttagcacagcaacaaagtgcgccacaaaaccgcgaaatgttgtgggcgcaagcgagcgtctgcccggaatgcaaacaacgcgcgacgctgatcaacgacgatacagatgtactgctggtggctaaggagcagctatgagtccagtgcttacacaacatgtcagccagcccatcacgctggacgagcaaacgcaaaagatgaagcggcatttgctacaggatatccgtcgcagcgcttacgtttatcgcgtcgattgcggcggctgcaacgcctgtgaaatcgaaatttttgctgccattacaccagtattcgacgcagaacgttttggcattaaggttgttagtagtccgcgtcacgccgatattttgttatttactggcgcagtcacccgggcgatgcgtatgcctgcacttcgggcgtatgagtctgcccccgatcataaaatttgtgtttcctacggcgcgtgcggtgtcggcggcggtattttccacgatctctacagcgtctggggcggtagcgacaccattgtccccattgatgtttggatccccggctgcccgccaacaccggccgccaccattcacggtttcgccgtggcgctcggtttgctgcaacagaagattcacgctgtggattatcgcgatcccaccggggtgactatgcaaccgttgtggccgcagatcccgccaagtcagcgtatcgccattgagcgagaagcgcggcggctggcgggctatcgtcaggggcgagaaatttgcgatcggctcctgcgccatttaagcgacgatcctacaggaaatcgggttaacacctggttgcgcgatgccgacgatccacgtctcaatagtatcgttcagcaactctttcgcgtactccgggggttacatgactgaagagtgcggggaaattgttttctggacgctgcgaaaaaagtttgtcgccagtagcgacgagatgccggaacacagctctcaggtaatgtattacagcctagctatcggccatcacgttggcgtgattgattgtctgaatgtcgccttccgctgcccactgacggaatacgaagattggcttgcactggtcgaagaggagcaagcccgacgtaagatgctgggggtgatgacttttggtgagattgttattgacgccagccacaccgccctgttgacccgggcattcgcgccactggcggatgacgcgacgtctgtgtggcaggcgcgtagcattcaattcattcatctgttggatgaaattgtgcaggaaccggccatctatctgatggccagaaaaattgcgtgagaaggatttctcattaataaggactgttgatggctatgagtgacgaggcgatgtttgccccgccacaaggaataacaattgaagcggtaaacggaatgctcgcggagcggttagcacagaaacacggcaaggcgtctttattacgcgccttcatcccgctgccgccgccgttcagcccggtacaacttattgaactgcatgttctcaaaagcaacttctattaccgctaccatgatgatggcagcgatgtgacggcaacaacagagtatcagggcgagatggtcgattatagccgtcacgccgtccttctcggcagtagtggaatggcggagctacgctttattcgcacccacggcagtcgttttacttcccaggattgcacactgtttaactggctggcgcggataatcaccccggttctgcaaagttggctcaatgatgaagaacagcaggtggcgctgcgtttgctggagaaagatcgcgatcatcatcgggtactggttgatattactaatgcagtgctgagtcatcttgatctcgacgatctgatcgctgacgtcgctcgtgagatccatcattttttcggtctggctagtgtcagtatggtactgggcgatcatcgaaagaacgagaagttcagcctgtggtgcagcgatctttctgccagtcattgtgcgtgtctgccacgctgtatgcctggcgaaagtgtattgctgacacaaacgctacaaacccgacaaccgaccttgacgcaccgtgcagatgatctgtttctctggcaacgcgacccgttattactcttacttgcatctaacggctgcgaatctgcgctccttataccgcttacctttggcaaccatacaccgggtgcattgttgctggcgcatacctcttccactctctttagtgaggaaaactgccagctactacaacacatagccgatcgcatcgctattgccgttggcaatgccgatgcctggcgtagcatgaccgatttgcaggaaagtttgcagcaagaaaaccaccagcttagcgagcagctccttagcaatctgggcatcggtgacattatctatcaaagccaggcaatggaagacctgctccagcaggtagatattgtggcgaagagcgacagtacggtgttgatttgtggtgaaaccggaactggcaaagaggtgatcgccagagcgatccatcaacttagcccgcgacgcgacaagccgctggtcaaaatcaactgcgctgccatccccgccagtcttctggaaagtgagttattcggtcatgacaaaggggcgtttactggtgcgattaatacccatcgtggtcgttttgaaattgccgatggcggcacgttgtttctcgatgaaattggcgatctgccgttagaacttcagcctaaactgctgcgcgtattgcaggagcgggagattgagcgtctcggcgggagtagaacgatcccggtgaatgtcagagtcattgccgccaccaaccgtgatttgtggcaaatggttgaagatcgccagtttcgcagcgatctcttttatcgcctgaatgtcttcccactggaattgccgccgctacgcgaccgtccggaagatatccctcttttagcaaaacatttcacgcaaaaaatggcgcgccatatgaatcgcgcaattgacgccatcccgaccgaggcactacgccagttgatgagctgggattggccgggcaacgtgcgcgagctggaaaacgtgattgagcgggcggtactgttgactcgtggtaacagtctgaatttacatctaaatgtccgacaaagccgtttactgccgacgctaaatgaagatagtgcgcttcgcagtagtatggcgcagttactgcacccgacgacgccagagaatgacgaagaagaacgtcagcgcattgttcaggtattgcgagaaaccaatggcattgttgccgggccccgtggcgcagcgacgcgattagggatgaagcgcaccacgctgctgagtcgaatgcagcggctggggatcagcgttcgcgaggtgttgtaatctgcttttgcaggagtatgcatgagaaacaaactctctttcgacttgcagttgagcgccagaaaagcggcaatcgctgaacggattgccgcccataaaattgcccgcagtaaagtgagcgtctttttaatggcgatgtccgctggcgtgtttatggcgatcggatttactttttacctttccgttatcgccgatgccccgtctagtcaggcattaacccatctggtgggcggcctttgctttacactcggctttattttgctggcggtttgcggcaccagcctgttcaccagcagcgtaatgacggtgatggcaaaaagtcggggcgtcattagttggcgaacttggctgattaacgcacttctggtggcctgcggtaatctggcaggtattgcctgtttcagtttgttaatctggttttccgggttggtgatgagtgaaaacgcgatgtggggagtcgcggttttacactgcgccgagggcaaaatgcatcatacatttactgaatctgtcagcctcggcattatgtgcaatctgatggtttgcctggcgctgtggatgagttattgcgggcgtagcttatgcgacaaaatcgtcgccatgattttgcccatcaccctgtttgtcgccagtggctttgagcactgtatcgccaatttgtttgtgattccgttcgccattgccattcgccatttcgcccctccccccttctggcagctggcgcacagtagcgcagacaattttccggcactgacggtcagccattttattaccgccaatctgctcccggtgatgctgggtaatattatcggcggtgcggtgctggtgagtatgtgttatcgggctatttatttacgtcaggaaccctgaaaaatcagcccggcgaaacagttcgtcgggctgaagattattcttgcgcgatttgcccatcgggccaggcatgaatcacggctttgatcagcgtcgccaacggaatggcgaagaatacgccccagaatccccacaaaccaccgaagatcaccacgcttaaaataatcaccagcggatgcaggttaaccgcttcggagaacaacaccggcactaacaggttgccgtccagcgcctgaataatcagatacaccgcgaagcagctccagaattcagtacctgcgccaaactggaatagcgccacgccaaccaccggaatggtcaccacaaatgcgccaatgtacggaataagaacgctgaagccgaccagcactgccagcagcaggctatagttcagcccgaagagcaagaaccccagccaggtggcgatccccaccacgatcatctccagcactttgccgcggatatagttggtgatttgttgattcatctccttccacacctgtcctgccagcccacggttacgcggcagcacccggcgaacggcgttcagcatctgctctttgtctttcagcaggaagaagaccatcaatggcaccagcaccagatagacggctatggtcagcaaaccgaccaggctggcgagggaaattttcaccacgctatcgcccatggtcagcatccgactgcgcatattttcggccattgcatcaataatgcccgcgtccattaacgccggatagcggcgcggcaacgtggcggcaaagtcagaaagcttattgagcatccccggcatatcgcggattaagtagatgccctgttgccaggcgataggcagtaccacgaacgccatcagtagcaatataccgacgaaaaccaccaatacaatgctcgtcgcccagcggcgggagcagccaatagattgcagacgcacggttggccattccagcaaataggccagcacaatagccaccagcaacggagcaagcaggccactaaagaaaaagataatgccaaatccggcaactaaaataaccagcaaggcaatcgcttccgggtcgctaaaacggcggcgataccattgcatcaacatttcgagcataaagaccttccctgaacctcaagagcgggattgcgatccgcaattgtatcgaaatgtcacaaaaaagacttcgctttttatgacggattcaggaaactgaaaagtcatttgagtgggctaatcttcgccgttacactcaaaggcggcgcggtgggaacgatatttcacagtatcggtcaaatgactatctccagaaatacaggatagaggttatgttcaggcagttgaaaaaaaacctggttgcaaccctcattgctgctatgaccattggtcaggtagccccggcgtttgccgacagcgcagacaccttgccggatatgggaacctccgcaggaagcacgctttccattggtcaggaaatgcagatgggcgactattatgtccgccagctacgcggcagcgcgccgttaattaatgacccgctgttaacgcaatatattaatagcctggggatgcgtctggttagccatgccaatagcgttaagacaccgtttcatttttttctgatcaacaacgacgaaattaacgcctttgctttctttggcggcaacgtggtgctgcactctgccctgttccgttattccgataacgaaagtcaactggctagtgttatggcgcacgaaatctcccacgtcacccaacgtcacctggcgcgagcgatggaagatcagcagcgcagcgcgccgctgacctgggtcggcgcgttaggttctattttactggcgatggccagtccgcaggcggggatggcggcgctgaccggtacactggcgggaacgcgtcaggggatgatcagtttcacccagcaaaatgaacaggaagcggaccgcattggtattcaggtgctgcaacgcagcggattcgatccgcaggcgatgccaaccttcctcgaaaaattactcgatcaggcgcgttactccagccgcccgccggaaattttattgactcacccgttgccggaaagtcgtctggcagatgcccgcaaccgtgctaatcagatgcgcccgatggtggtgcagagcagcgaagatttctatctggcgaaagcgcgcacactggggatgtataattccggacgtaaccagctcaccagtgatttgctggatgaatgggcgaaaggaaacgttcgtcagcaacgagcagcacaatatggtcgtgctttacaggcgatggaagccaataaatacgacgaggcgcgtaaaacgctgcaaccgttactggcggcagaacctggcaacgcatggtatctcgatctggctactgatatcgatcttgggcaaaacaaagccaatgaggcgatcaatcgtctgaaaaatgcccgcgatttacgcaccaatccggtgttgcagctcaacctggcgaacgcttatttgcaaggcggtcaaccacaagaagcggccaatattctgaatcgctacacctttaataataaagatgacagcaacggctgggatttgctggcacaggcggaagccgcgctaaataaccgcgatcaggagctggctgcgcgagcagaaggttatgcgctcgccggacgactcgatcaggccattagcctgttgagtagcgccagtagccaggtgaaattaggcagcctgcaacaagcgcgttacgatgcgcgcatcgaccagttgcgccagctgcaggaacgctttaagccttataccaagatgtaattcgcattaaaggaagaacaatgaccaaacaggtaaaaatctaccataacccacgctgtagtaagagccgggaaacgctgaacctgctgaaagaaaacggcgtggagccagaagtggtgctctaccttgagacacccgccgatgcggcaacgctgcgcgatttgctgaaaatactggggatgaatagcgcccgtgaattgatgcgccagaaagaggatctttataaagaactgaacctggctgacagtagccttagcgaagaggcgctgattcaggcaatggtggataatccgaagctgatggagcgcccgattgtggtcgcgaatggcaaagcgcggattggtcgtccaccggagcaggtactggaaatcgtgggttaagatgtgctccatcgctagttgaagcacattgccggatgcgacgcttgccacgtcttatccggcctacgaatactatggattaacttcgcgtagttcggataaggcgttcgcgccgcatccgacaataaacaccttatttacaacttcagaatttctttcacaaacggaatggtcagcttacgttgcgcggtaatgctcgcacgatccaactgatccaacgtcataaatagcgtgcgcatttctctgtcgagccgcttcagcaagaaacgccccacatcttccggcagttcaaaaccacgcaaacgcgcgcgtaactgtagcgcctgcaacttatcttcatcagaaagtggctgcaatttgtagatctgcccccagtcgagtcggctcgcgagatccggtaatcccagattcaactgccgcggtggacgatcgccggtgatcaacaaccgtgttttgccgctttccagaattcgattgtagagatcgaaaatcgccatctcccacaactcatcgcctgcaatacactcaatgttgtcgatacagaccaggctcaaatgctccataccgtcgagcacttccggaacaaaccaggtgcgtttatccagcgggacatagcccaccgcatcgccacgctggctcaattccgcgcaagccgcgtgcagcagatggctgcgccccgcgccttcgcgtgcccagagatagatgtaaccgctatgttcctgacgcagcacgttttgcagcgcggccagtaaagaggagttatcccccggccagaaacttgcaaaggtttcgtcgtcaggaagataaagtggcaaagagagctgtgccggtgtgttcagagatacctcaaccaggatttcacaaaatcggctgaagtttaccacagaatcccatgatgtttgaaccgggcagcaacactgcccggtcggtacattatttgtctgttatatccgcgtcttctgcgtccagcaccacttcttcagggcgcagcacactgatcagtttgaagatcaaacttaagccgataccgacgatggtcgccagcgccataccttttaactccgccgcgccgatgtttaccttcgcgccactgacgccgatgatcaaaatcacggaagtcaggatcaggttctgtgctttgttgtaatccactttgctttcgatcaaaacacgaataccggaagcaccgatgacaccataaagcagcaggctaacgccgcccatcaccggcaatgggatcatctggatagcggcagccagtttaccgacgcaggaaagcaggatagcgaaaatcgccgccccgccgataacccaggtactgtaaacacgggtgatcgccatcacgccaatgttttctccgtaagtagtatttggcgtagagccaaagaagccggaaatcacggtgctcaagccattagcaaacatgctacggtgcagacctggatcgcgcagcagatcttttttgacgatattagccgttactaccaggtgccctacgtgttcggcaataaccactaacgccgctggcagaatagtcagaatggcaaaccactcgaagcgcggcgtatagagggttggcagcgcaaaccagtgagcattaataatcggcgtggtatcgacaattcccattgcgaaagagagcgcgtaccccaccagcacgccaattaaaatcgggataattgccaggaaaccacgaaacagcacggaacctaaaaccgtgaccgccagggtggtaatagagatgatgatggttttggagtctggcgtttgcccttcagccgggagtaaacccgccataccggcagctacgcccgccagctccagaccgatgacggcaacgattgcgcccattgccgcaggtggaaacagcacgtccagccagccggtccccgctttcttcacgataaaagaaaccaggcagaacagcacgccgcacataataaagccgcccagcgcgacttcataccctaacggcaacagtaacaataccggactaataaaggcaaagctggaaccaagataagccggaattttccctttacagatgaagagatacagcagcgttccaataccgttaaataacagtacagtcgccgggttaatatgaaataagacgggcaccaggacggttgcaccaaacatggcgaacaaatgttgcaaactaagcgggattgtctgtaaaagtggcggtctttcactcaccccgatagcacggcgcgtcatagtattatcctctgtattatgtgttataggcgctttactcaaaaaaaagccgactcttaaagtcggctttaattatttttattctttatttcgtaccaaagattttgtcaccggcatcgccgaggcccggaataatgtatccgtgctcgttcagtccctgatcaatgcttgcggtatacagttcgacgtccgggtgcgctttttccagcgcagcgataccttctggcgcagctaccagcaccagaactttgatgctgctgcagcccgcttttttcagcaggtcgatggtcgcgataacggaaccaccggttgccagcattgggtcaacgatcagcgccatacgctcatcgatgttagaaaccagtttctggaagtacggtaccggctccagcgtttcttcattacggtacataccgacaacgctgatgcgcgcgctcggaacgttttccagcacaccgtccatcataccaagacccgcacgcagaattggcacaacggtaattttcttacctttgatctggtcgatttctaccgggccgttccagccttcgatagttactttttccgtttcgaggtcggcggtcgcttcgtaagtcagcaggctacccacttcggaagcgagttcgcgaaagcgcttggtgctgatatcttgctcacgcatcagtcccagcttgtgtttgacgagtgggtgtttgacttccacgatcttcatactctttctcctttgaggggcagccacaaaaaaaatcgacggattatacctcctttcttcaaggcggcaatattcttttcgttgactttagtcaaaatgataacggtttgagataaagttattttatattcagatggttatgaaagaagattattccatccgaaaactaacctttaccctggcacaagtcttctttcgccgcgcgcctggggaaaagacgtgcaaaaaggttgtgtaaagcagtctcgcaaacgtttgctttccctgttagaattgcgccgaattttatttttctaccgcaagtaacgcgtggggacccaagcagtgaccgataaaacctctcttagctacaaagatgccggtgttgatattgacgcgggtaatgctctggttggaagaatcaaaggcgtagtgaagaaaacgcgtcgtccggaagtgatgggcggtctgggcggcttcggtgcgctgtgtgcattgccgcaaaaatatcgtgaacccgtgctggtttctggcactgacggcgtaggtaccaagctgcgtctggcaatggacttaaaacgtcacgacaccattggtattgatctggtcgccatgtgcgttaatgacctggtggtgcaaggtgcagagccgctgtttttcctcgactattacgcaaccggaaaactggatgttgataccgctagtgcggtgatcagcggcattgcggaaggttgtctgcaaagtggctgtagtctggtgggtggcgaaacggcagaaatgccggggatgtatcacggtgaggattacgatgtcgcgggtttctgcgttggcgtggtagaaaaaagtgaaatcatcgacggctctaaagtcagcgacggcgatgtgctgattgcactcggttccagcggtccacacagcaacggctatagcctggtgcgcaaaattcttgaagtcagcggttgtgatccgcaaaccaccgaacttgatggtaagccattagccgatcatctgctggcaccgacccgcatttacgtgaagagtgtgctggagttgattgaaaaggtcgatgtgcatgccattgcgcacctgaccggcggcggcttctgggaaaacattccgcgcgtattgccagataatactcaggcagtgattgatgaatcttcctggcagtggccggaagtgttcaactggctgcaaacggcaggtaacgttgagcaccatgaaatgtatcgcaccttcaactgcggcgtcgggatgattattgccctgcctgctccggaagtggacaaagccctcgccctgctcaatgccaacggtgaaaacgcgtggaaaatcggtatcatcaaagcctctgattccgaacaacgcgtggttatcgaataatgaatattgtggtgcttatttccggcaacggaagtaatttacaggcaattattgacgcctgtaaaaccaacaaaattaaaggcaccgtacgggcagttttcagcaataaggccgacgcgttcggccttgaacgcgcccgccaggcgggtattgcaacgcatacgctcatcgccagcgcgtttgacagtcgtgaagcctatgaccgggagttgattcatgaaatcgacatgtacgcacccgatgtggtcgtgctggctggttttatgcgcattctcagcccggcgtttgtctcccactatgccgggcgtttgctgaacattcacccttctctgctgccgaaatatcccggattacacacccatcgtcaggcgctggaaaatggcgatgaagagcacggtacaagcgtgcatttcgtcaccgatgaactggacggtggcccggttattttacaggcgaaagtcccggtatttgctggtgatagcgaagatgacatcaccgcccgcgtgcaaacccaggaacacgccatttatccactggtgattagctggtttgccgatggtcgtctgaaaatgcacgaaaacgccgcgtggctggatggtcaacgtctgccgccgcagggctacgctgccgacgagtaatacccccgtaattaaagcgccagctctgccgctggcgtttttcaattcacctgtaaatcgcaagctccagcagtttttttcccccttttctggcatagttggacatctgccaatattgctcgccataatatccaggcagtgtcccgtgaataaaacggagtaaaagtggtaatgggtcaggaaaagctatacatcgaaaaagagctcagttggttaagcttcaatgaacgcgtgcttcaggaagcggcggacaaatctaacccgctgattgaaaggatgcgtttcctggggatctattccaataaccttgatgagttctataaagtccgcttcgctgaactgaagcgacgcatcattattagcgaagaacaaggctccaactctcattcccgccatttactgggcaaaattcagtcccgggtgctgaaagccgatcaggaattcgacggcctctacaacgagctattgctggagatggcgcgcaaccagatcttcctgattaatgaacgccagctctccgtcaatcaacaaaactggctgcgtcattattttaagcagtatctgcgtcagcacattacgccgattttaatcaatcctgacactgacttagtgcagttcctgaaagatgattacacctatctggcggtggaaattatccgtggcgataccatccgttacgcgctgctggagatcccaagtgataaagtgccgcgctttgtgaatttaccgccagaagcgccgcgtcgacgcaagccgatgattcttctggataacattctgcgttactgccttgatgatattttcaaaggcttctttgattatgacgcgctgaatgcctatagtatgaagatgacccgcgatgccgaatacgatttagtgcatgagatggaagccagcctgatggagttgatgtcttccagtctcaagcagcgtttaactgctgagccggtgcgttttgtttatcagcgcgatatgcccaatgcgctggttgaagtgttacgcgaaaaactgactatttcccgctacgactccatcgtccccggcggtcgttatcataattttaaagactttattaatttccccaatgtcggcaaagccaatctggtgaacaaaccactgccgcgtttacgccatatttggtttgataaagcccagttccgcaatggttttgatgccattcgcgaacgcgatgtgttgctctattatccttatcacacctttgagcatgtgctggaactgctgcgtcaggctagcttcgacccgagcgtactggcgattaaaattaacatttaccgcgtggcgaaagatagtcgcatcatcgacagcatgatccacgccgcacataacggtaagaaagtcaccgtggtggttgagttacaggcgcgtttcgacgaagaagccaacattcactgggcgaagcgcctgaccgaagcaggcgtgcacgttatcttctctgcgccggggctgaaaattcacgccaaactgttcctgattagtcgtaaagaaaacggtgaagtggtgcgttatgcacacatcgggaccgggaactttaacgaaaaaaccgcgcgtctttatactgactatagcttgctgaccgccgatgcgcgcatcaccaacgaagtacggcgggtatttaactttattgaaaacccataccgtccggtgacatttgattatttaatggtaagcccgcaaaactcccgccgcctattgtatgaaatggtggaccgcgagatcgccaacgcgcagcaagggctgcccagtggtatcaccctgaagctaaataaccttgtcgataaaggcctggttgatcgtctgtatgcggcctccagctccggcgtaccggttaatctgctggttcgcggaatgtgtagcctgatccccaatctggaaggcattagcgacaacattcgtgccatcagtattgttgaccgttaccttgaacatgaccgggtttatatttttgaaaatggcggcgataaaaaggtctacctttcttccgccgactggatgacgcgcaatattgattatcgtattgaagtggcgacgccgctgctcgatccgcgcctgaagcagcgggtactggacatcatcgacatattgttcagcgatacggtcaaagcacgttatatcgataaagaactcagtaatcgctacgttccccgcggcaatcgccgcaaagtacgggcgcagttggcgatttatgactacatcaaaagtctcgaacaacctgaataaccctatgccaatacacgataaatcccctcgtccgcaggagtttgctgcggtcgatcttggtagtaacagttttcacatggtcatagcccgtgtggtagatggtgccatgcagattattggccgcctgaaacagcgggtgcatctggcggacggcctggggccagataatatgttgagtgaagaggcaatgacgcgcggtttaaactgtctgagcctgtttgccgaacggctacaagggttttctcctgccagcgtctgtatagttggtacccatacgctgcgtcaggcgctgaacgccactgactttctgaaacgcgcggaaaaggtcattccctacccgattgaaattatttccggtaatgaagaagcccgtctgatttttatgggcgtggaacatacccaaccggaaaaaggtcgcaaactggttattgatattggcggcggatctacggaactggtgattggtgaaaatttcgaacctattctcgttgaaagccgccggatgggttgtgtcagctttgcccagctttattttcctggcggggtcatcaataaagagaattttcagcgcgctcgcatggcggcagcacaaaaactggaaactttaacctggcaattccgtattcagggctggaacgttgcaatgggcgcttccggtaccataaaagccgcccatgaagtgttaatggaaatgggcgagaaagacgggataattaccccggaacgtctggaaaaactggtaaaagaagttttacgtcaccgtaatttcgcaagcctgagtttaccgggtctttccgaagagcggaaaacagtcttcgttccgggactggcgattttatgcggtgtgtttgatgctttagccatccgtgaactgcgcctttctgacggggcgttacgcgaaggcgtactgtatgaaatggaaggacgtttccgtcatcaggatgtgcgtagtcgcaccgccagcagcctcgccaaccagtatcacatcgacagcgaacaggcccgacgggtgctggataccactatgcaaatgtacgaacagtggcgggaacagcaaccgaagctggcgcatccgcaactggaggcgctactgcgatgggccgccatgctgcatgaggtcgggttgaatatcaaccacagcggtttgcatcgccactccgcttatattctgcaaaacagtgacttgccgggttttaatcaggaacagcagctgatgatggcgacactggtgcgctatcaccgtaaagcgattaagctcgacgatctaccgcgctttaccttgtttaagaagaaacagttcctgccactgatacagctattgcgccttggcgtattactcaacaatcaacgtcaggcaaccaccacaccgccaacattgacgctgattactgatgacagtcactggacactgcgtttcccgcatgactggtttagtcagaatgcgctggtactgcttgatctggaaaaggagcaagaatactgggaaggcgtggctggctggcggttgaaaattgaagaagaaagtacaccagaaatcgccgcttaatactttgcgggccgacgagaaatgtcggcccgcattattcaggcactttcgcgaatgggttcgatttcattcagcgtatcaattaacggctgcggcttaccaataagataaccctgcatataatcgatccccaaagagagcaccgcctcgcggatctcttcgttttcaacgtactctgccactaccagcattttcttcattcgcgccaggtggcaaatgcttgccactatctgataatccagactattactcacaatattgcggataaaactgccgtcaattttaagcagatcggcattcacatttttaagccgcgcatagctggcgtagccggtgccgaaatcatcaatcgcaatctggcagcctaattcctgaagatgctgcaaggtgatttgcgcctgcttaacattggtcagagcattactttcggtgacttcaaaaataagttgccacgcttcaatctgatatttagccagcaactgactgacttcaacaggaaaacgagcctgacatacgctggttggagacagattaatagcaaaacggtgagcgggcatcttcgctctgttttcagccataaattgcagcgtatgctcaatgacccacatgtcgatactgctgcttaaaccaaattcgtgcgcgaccggcaagaagctatcggggctgatcagttcatcattctcacctttcatgcgcagaagaatttcatggtaaacatcaccacgcataccggtaatcggctgggccatcaggaaaaaatggttgtgttccagcgcctgctgtagtcgattcatcatcgcgactttatctttcaattcgcgttgcaaatacattgccccgcgacgctgcatattttccggggcgttggtcacgatggaaagttcggcgaccgtatttagctctcccagcagcaggtagatatgattcactgggctgcgcacatagcagtaactgacgccaatctgcggttgcatcggcatgccatcccaaaagaaacgaaattgcttgagatggctatccagtgcggtaatgcgctcctggtggctttctgtattcagtcgcagcgcgagatcgttaccgctaagctgataaacatcttcacccggttccagcaagggactcagccagtgagaaagtttttgcttgtattgaatccgcagcatgatgccatagttcttaaccagcatttccatgccagggatgcgtaaataacaaagcgcagaccagggggcatcacgcaacgcgcgattcagggcgcgaacatttggcagatgaaccaccgggtccacatacgcaagccgctgaatgcgtctgactaccgctctctgacgggttgccagtacagccatataattgacaataaaagagaataccagataactggaggaggttatggtcagctgcgtggtatagccaggataaatgggaatgtaattttgatagctgtggatgctgatcatcaacacgaccgcccagagcaggctaatcagcttataaccatagcgcatcgctccccacatcatcaggggcagcaataaactcaaggtataattggtgctaaaaattgtgcttttttcatttaacggcatgcataacagcaacaataaagcacctaatgccagtagccagagcgcgaactcttttttggtgactttggcatcaacctgctgttttaattggctataatagctacgtaaataaaatggatttcgcactacccgaatgatgaagtagcacagcgggacaccgatcagattacccaccagtaaggcctgataattgattaaagtcccgaggttaaaaggcatgacaccgaccagattttctctgctcgccagtaatcctacaaatgcagcaaactggaaaagtatcagaaacagcgttgcaggaaacacaatctgccagaatatacgctgggaaattaaacgggtatcaccatgactaacgttgttacgccggggagtaaagaccctgtaaccgccccaacagagaatgataatgataataaaattagccgttaaacttagcgtttcgtaaaaacccagctctgcatatttgcggacaaaaatccctaaggcgatccctggcaatgccgcccagctgaaaaacatcatcatgctgatcatcagtgccagaggcagataaaagagaaaaacctcaccggaagaaatatgcgcgaaagtattaatgtgggcgaaaatgggcaagattaaagaaggcaggaacagcggaagcccccaccatttatcacgtatttttatataagttgcattcagtttcatagatgctcagcagaatcccccacatcctgaaggaggtgtattcagacaggcatcccacctgacttcgaatgatgattattcatcactatagagagcattgattctaagtgtcatatgaaagtaccaattgatatatatcaaacaaaataaccctgattaatgaattattacgtttatcatgttaattcatcattattacatcatcattgtaaataattaaattaacttccataacattaaaatatgtatccactgacgcttttttacataacgaagaattgaccattttgtcctgttgtgccttaatgtaagtaccgtccacagcgtgggacatacttcaaggaaccttttgtgagtcaggcaaccagtatgcgaaaacgacaccgatttaacagtcgcatgacccgtatcgtactgctcatcagctttatcttcttctttggccgttttatctacagctccgtcggtgcctggcagcaccatcagagcaaaaaagaagctcagcaatccacactctccgtcgaaagtccggtacaacgttaacggttaccttctccactttcacagaacataacggcacttcgctgtcggatgcttttgctgtttgggattatcaaagcggcagatattctttcatcttaaattttacgtctttatcctgactgatgtttatcctgtttggctgcgaaataaatataaaattaatatatatgttgtaatgatatatttttataaattattccctgcgtgaattttaataaatttaatctatccctttatacgcaatacatttactttcctcttttgatgatcttaaatgtcttatttttcgtaatgtgtataacaaggaatagtgatgaaatttaaaaaatgtcttctgcctgtggcaatgttagcgagtttcactctggcaggatgccagagtaatgctgacgatcatgctgccgatgtttatcaaaccgatcaactgaataccaaacaagaaactaaaaccgttaatattatttccattcttcccgcaaaagttgccgtagacaactcccaaaataaacggaacgcacaagccttcggcgcgcttattggcgcagtcgctggcggtgttatcggccacaacgtcgggtctggcagcaattccggaacgacggcaggtgcagttggcggcggagctgtaggcgcggcagcgggttctatggtgaatgataaaaccttagtggaaggtgtttctttaacctataaggaaggcaccaaagtgtatacctctacccaggtgggtaaagagtgccagtttacgacaggtttagccgttgttattaccacgacgtataacgaaacgcgtattcagccaaataccaaatgtcctgaaaagagctaataatcaggaggagtcatgaagaaagtttttctttgcgccatcttagcctccttaagctatccggctatcgccagtagtttgcaggatcaactctctgctgtcgcagaagcggaacagcaaggtaaaaatgaagagcaaaggcagcatgacgaatgggtcgcggagcgcaacagggaaatccagcaagagaagcaacgtcgcgcaaatgcccaggccgccgctaacaaaagagcggcaacggcagcggcaaataagaaagctcgtcaggataaactggacgccgaagcctctgcggacaaaaaacgcgatcaaagttatgaagatgagctacgcagcttagagattcagaaacaaaaactggcgctggcgaaagaagaagcccgcgttaagcgagaaaacgaatttatcgatcaggaactgaagcacaaagctgcgcaaaccgatgtggtgcaatctgaagctgacgccaacagaaatatgactgaaggcggtcgcgatctgatgaaaagcgtgggcaaagcagaagagaacaaaagcgacagctggtttaattaatcgatgttagtaacttcaatcctataattcttgaagataaaaaaccctctgtagtaacagagggttttgttcattcatagtgcagggtcaaatcattcccactcaatggtagctggcggcttgccgctgatgtcatacaccacgcgggaaataccgttcacttcattgataatgcggttggaaacgcgaccgaggaaatcgtacggcagatgcgcccagtgtgcggtcataaagtcgatggtttcgacagcacgcagagagacaacccagtcatacttacgaccatcgcccattacgccaacggaacgtaccggcaggaacacagtgaacgcctggctgactttgtcgtacaggtccgctttacgcagttcttcaatgaagatggcgtcagcacggcgcagcaggtcacagtactctttcttcacttcacccagaacacgaacgccaaggcctggtcccgggaacgggtgacggtacagcatgtcgtacggcaggcccagctccagaccaatcttacgcacttcgtctttgaacagctctttcagcggttcaaccaggcccatcttcatctctttcggcaggccgcccacgttgtggtgagatttgatgacgtgtgctttaccggttgcagacgccgcagattcgataacgtcagggtagatggtgccctgcgccagccacttcacgtcttccagtttcagcgcttcttcatcgaatacttcaacgaaaacgcgaccgatgattttacgttttgcttccggatcgttttcgccagccagcgcactcaggaagcgatcttctgccggtacgtgaacaatgttaagaccaaagtgatcgccaaacatatccagaacctgctctgcttcgttgaggcgcagcaggccgttgtcgacgaatacgcaagtcaggtttttaccgatagcgcggtgcagcagcattgcggttacggaggaatccacaccaccagagaggccgaggatgactttatcgtcgcctacctgctcgcggatgcgagctacagcatcgtcgataattttcgctggcgtccacagggcttcacactggcagatatcacgcacaaaacgctccagcatgcgcataccctggcgggtatgagtcacttccgggtggaactgtacgccatagaagcgtttttcttcgttagccataatggcaaacgggcagctttcggtgctggctacggtgatgaagtcggacggaatagcggtaactttatcgccgtggctcatccagacatcgagcagcggtttaccgtctgcggtcagcgcatcttcgataccgcgaaccagtgcgctgtcgtttacgacttcaacctgcgcgtagccaaattcacgttcgttagaggcttcaacgtgaccgcccaactgcattgccatggtctgcatgccatagcaaacgccgaataccggtacgcctgcttcaaagacatactgcggcgcacgcggactgttttcttcagtagtactttccgggccgccggaaagaataatgccgcttggattgaagtcacgaatttgtgcttctgtcacatcccacgcccacagttcgcagtaaacacccagctcacgcacgcggcgcgcaaccagttgagtgtactgagaaccgaagtccagaatgaggatgcgatgcttatgaatgttttccgtcattgacgcttattccgaggcaagtgaaacagataatataaatcgcccgacatgaagtcgggcgaagagaatcaggagcccagacggtagttcggggactctttagtaatggtcacgtcgtgaacgtggctttcctgaatgcccgcaccgctgatacgtacaaactccgctttagtacgcagttcgtcgatagtaccacagccggtcagacccatacaggagcgcaggccgcccatctgctggtgaatgatctctttcaggcgacctttataggctacgcgaccttcgataccttccggcaccagtttgtcggcagcgttatcgctctggaaataacggtcagaggaacctttggacatcgcgcccagggaacccataccacggtaagatttgtaagaacggccctggtagagttcgatttcacccggagattcttcagtacccgccagcatggaacctaccatcaccgcgcttgcgccagcggcgatagctttggcgatgtcgccggagaagcgaataccgccatcagcgataaccggaataccggtgccttccagggcttctactgcgtcagcaacagcggtaatctgcggaacaccgacgccagtcacgatacgagttgtacagatagagccagggccaatgccgactttaaccgcactgcaaccagcttctgccagagcgcgtgcacctgcagctgttgccacgttgccgccgataatttgcagatccggatatttagcacgggtttcacggatacgttgcagtacaccttcactgtgaccgtgggaggagtcgatcagcagaacgtcaacgcctgcggcaaccagcgcgtcaacacgctcttcgttacccgcacctgcgccaaccgctgcaccaacacgcagacggccttgctcgtctttacaggcgttcggtttacgttccgctttctggaagtctttcacggtgatcatgccgatcaggtggaattcgtcatcaaccaccagcgctttttcaacgcgtttttcgtgcatttttgccagcaccacttcacgggcttcaccttcacgcacggtgaccagacgctctttcggcgtcatgtaaacgctaaccggctggttcaggtcggtaacaaaacgcacgtcacgaccggtgataatacccaccagttcgttttcttcggtaacgaccggatagcccgcaaaaccgttacgctcggtcagttctttcacttcgcgcagcgtcgtggttggcagaacagtctgcggatcagtcaccacaccagattcgtgttttttcacacggcgaacttcttctgcctggcgttcaatggacatgtttttgtggataaagccgataccgccttcctgagccagagcaatagccaggcgcgcttccgttacggtatccattgctgcggaaagcatagggatattcagacgaatagttttcgtcagctgggtgctgaggtcagcagtattcggcagaacggtagagtgagcaggaacgaggagaacgtcgtcaaacgtcagagcttctttagcgatacgtagcatgggcaatatctcgaccagagtggttaataaatattgccgcggcattatacagagcgtaaccgattgcatctacccctttttgcaaaaaatgcttgctatccccgaagggcgggttactatcgactgaataacctgctgatttagaatttgatctcgctcacatgttaccttctcaatcccctgcaatttttaccgttagtcgcctgaatcaaacggttcgtctgctgcttgagcatgagatgggacaggtttggatcagcggcgaaatttctaatttcacgcaaccagcttccggtcactggtactttacactcaaagacgacaccgcccaggtacgctgcgcgatgttccgcaacagcaaccgccgggtgaccttccgcccacagcatgggcaacaagttttagttcgcgccaatattacgctctacgagccgcgcggcgactaccagataatcgttgagagtatgcagccggccggtgaagggctgctgcaacagaagtacgaacagctcaaagcgaagttgcaggctgaaggtttgttcgatcagcaatacaaaaaaccacttccctcccctgcgcattgcgttggtgtgatcaccagtaaaaccggtgctgcgctacatgatattttgcatgtgttaaaacgtcgcgatccttctctgccggtgatcatctaccctgccgccgttcagggcgatgacgcgccggggcaaattgttcgcgccattgaactggcgaatcagcgcaatgagtgcgacgtattgatcgtcgggcgcggcggcggtagcctggaagatttatggagttttaacgacgaacgcgtagcgcgggcgatttttaccagccgcattccggttgtcagcgccgtcgggcatgagacggatgtgaccattgccgattttgttgccgatctgcgtgcgccaacgccgtctgccgccgctgaagtagtgagccgtaatcagcaagagttactgcgccaggtgcaaagcacccgtcaacggctggagatggcgatggattattatctcgccaaccgcacacgtcgctttacgcaaattcatcaccgattacagcaacagcatccgcagctccggctggcacgccagcaaaccatgcttgagcgcctgcaaaagcgaatgagctttgcgctggaaaatcaacttaagcgtaccgggcaacagcagcagcggttaacacagcggctgaatcagcaaaatccacagccgaagattcatcgcgcgcaaacgcgcattcagcaactggaatatcgtttagcagaaaccctgcgcgcacagcttagcgccacgcgtgaacgtttcggtaatgcagtaacgcacctcgaagccgtaagcccactgagtacgctggcgcgtggatacagcgttactactgctactgacggcaatgtactgaaaaaagtgaagcaagttaaagcgggtgaaatgctaaccacacgtctggaagacggctggatagaaagtgaagtaaaaaacatccagccagtaaaaaaaagccgtaaaaaggtgcattaagccagcacgaattcaacgcgttttttgcttatcaagccatgcccgtgctgacagaagtaatctactgcaccacaggcttttaacacctgcaacggttgatggcagtctggacaaagagctttcatttcaataaattccccgcaggatcggcaacgcgcatggccgttatcctgatcaagcacatgctgacattgtggacaatgcagttccatatgaattcctccggtagccattccctctacattcatagagggaatggcagataaaatacttacggataattatttatttttcttgatgtgcttcatcagacgcttacgtttacgcatctgggttggcgtcagggtgttacgcttattcgcatacgggttttccccttctttgaactgaatacgaatcgggcttcccattacgtccaggcttttgcggaagtagttcatcaagtagcgcttgtaggaatcaggcaggtctttcacctgattaccgtgaatcaccacaatcggcgggttataaccaccggcgtgggcatatttcagcttcacacgacgaccgcgtaccagcggcggttggtgatcttcaacagccatcgtcatgatgcgcgtcagcatagaggtccccacacgacgggtggagctgtcatacgcttcacgtacactttcaaacaagttaccaacaccactgccgtgcaaggcagagataaagtgcacacgagcaaaatcgataaagcccagacggaagtccagcgtttctttcacctgctctttcacttcctgactcaggccatcccacttattcaccacaatgacaagactgcgcccactattgagaataaagcccagcaggctgagatcctgatcggaaataccttcgcgcgcatcaatcactaacatcaccacgttggcgtcttcaatggcctgcaacgttttgattacggagaatttctctacagcatcggtgattttgccgcgtttacgtacgccagcggtgtcaatgagcacatactcacgtccatcgcgttccattgggatgtagatgctgtcacgcgtcgtgccaggcatgtcgtaaacaacaacgcgctcttcaccaagaatacggttagtgagtgtagacttacctacgttcggacgacccacaatcgccagtttgatcggcagactttgcgggtcgaagtcgtcttcctcttcttcttcgccgttctcttccgcttcaaattgcgcccagtattcagcgtcttcgtcgacttcctcttgcggtgcgagatcttccatccacggcagcagcacatgctccagcagacttaatacgccacgaccgtgagacgcggcgatcgggtagatttcacctaaaccaaggctgtagaaatcaaccactgcctgatcgggatccagaccgtcagttttgtttgccaccaggaaggtcggtttttcacgggagcgcagatgtttggcaatcgcttcatctgccggcatcaggcccgcgcgcgcatccaccataaacagtacgacgtccgcttcttcaatcgccagcaggctttgttccgccatgcgggtttctacaccgtcttctgtgccatcaatcccgccggtatcaatacagataaactcacggccttcaatttccgcacgaccgtacttacggtcacgagtcagacccgggaaatccgcaaccagcgcatctcgggtgcgagttagacggttaaataacgtggattttcctacgttagggcgcccgacaagcgcgaccacaggtaccatgtttaaagcctcatttttataaatcatcagacaacgcacgctatattcgcgtcgttgttaaaaacaggaaaacggcccctgtccaggagccgttttcaaagtgaacgacagagacgattaacgtgtaatagagtacacggttccgtcttttgcctggatcagcagtttgccgtcagcggcaaccggttcagtctggaaaccggaactatcaactttttgctgggcaacgaaacgaccatcttcgacgttaatccagtgcagataaccttcactgtcaccgaccaccaggttgccattatacagcaccggagaagtcagcaggcgatgcagcagatcgctttgtgtccacagcgtaacgccgccatcaatggtcaacgccatcacccggtcattttgatcgaccagatagatgcgattgccgtcgacgatgaaatcattcacgctacccagttcgcgtttccacataatctgaccactgcgcagatcaagcgccgtcaggttaccattataggccagcgcgaaaacaacgccgttaacaacgacgggagtcgtgtcaacatcgctcagacggtcaatttcggtagaaccggtcgcctgggaaatacgctgctgccaaatcatctggccctgttccatcagcactgcgctgacgcgaccattatcgccccccacgacggccgcaccaaaagccgttgtcggcgcagactcgccacgcaaagagaggctaggcatatcgaggttaactgtccatttgacagcgccgtcagcttcgttcagcgcttgtaactgaccgttactggtgtggattaacaccagaccgtcgctgaccaccgggcggctaagtgcttcacccgcgactttagtttgccatgccacagtaccatcgctggtattcagcgcgtaaacctgcgccttttcgctgccaatgtagacatgcccaccagacacggtcacaccgccagaaagtaatgcaggctctttagagaaccagccatctttctcggccaggctgacagaccagatttctttgccatcatccgcattcagcgcttttactaaaccagcgcggtccgctgcatagacaacgttgtccgccagtgccggatgaagattggaatagaagttgccaatgccgctaccaacggaagtgctccacgccgtggtcggcgtaaactggttttcaacggttggcaatggggacatctttaccacatcttcttcgctgttaaacaggctacagccgcttaaaagggtaacggaaagcagtcctggcagcagtaatttacgcaattgcatcgggtccctctcagatggacaaattattaattttcatctgcatcatttcgctcagtgccggagtaacatcgcttttcacgcctgcttcccatgcactacgcgcaccttgcttatcacctttgctcagcaatgcttcaccacgcaggtcggcaacaatggcagcccacccttcacctttgatggtatcaagggttttcagcgcggcatcagcctgcttgagctgtacctgaacgcgagcaagacgcagatttatcacggctttgagattttcatcgctcgtgtctgccagcccctgttgtaactgggcggcagctttctctagttcatttttgtcaacaaattgctgcgcaagttccaaagaagccagcgcaccataagtatttttattttcagcagcaaatttttccgccgccgggatgctatccggtttgccttcgctcactgcggtaaccgcattttgataggcaagagaagcggagcgtgcagaatcaacctgatggctgttccagtagcgccagccaatcagtgcgccaacgcccaaaatcaccccaacagccagtgctttgccattttcagcaaaaaagcgtttaaccgcttctacctggtcgttttcgttctcgtaaatttccacgctgtccttctccttccttaacccagtaacgtgcgcaaatgcgcggctacgctatcctgcgcaactgccgtttgctcaccagagcgcaaatccttcactactgctgtgccgttagccacttcagactcacccagcaccacagcaacgcgggcaccccatttatcagcacgggcaaactgtttcttaaagttgccgccgccgtggttggtcatcaatttcacgcccggtaattcatcacgcagacgctcagctaatgccatagccgcagattgtgtatcagcaccactagccaccaggtatatatcgacaacaggatcggctttaaattccggattaacggcctgtactaacaatacaagacgttcgaggcccatagcaaaaccgacagccggtgttgcacgaccgcccagttgttccacaagaccgtcataacgaccgcctgcacacacggtgccctgggagccgagactgttagtcacccactcgaaaacggtacggttgtagtaatccagaccacgcaccagacgctggtttacggtgtaagcgatccccgcgctctccagcagtttgcacagaccggcaaaatgctcacgagattcctcgtccagatagtcacctaatgccggagcgtcgttgagaagcgcctgcacttccggatttttactatccagcacgcgcagcgggttagtgtacatgcggcgtttgcagtcttcgtccagcttttctttatgctgctcaaggaatgccaccagcgcatcgcggtaattggcgcgtgcttccaggctaccgatagagttcagctcaagagttacgtgctcggaaatacccagcgcgcgccaccagcgggcagtgagcataatcagttcagcgtcgatatccggaccttgcagaccgaaaacttcgcagcccaactgatggaactgacgataacgccctttctgcggacgctcgtgacggaacatcggcccgatataccacagacgctgttcctgattgtacagaagaccatgctcgatgccggcgcgtacacagcccgccgtcccttcagggcgcagagtcaggctgtcgccattgcgatcctcaaaggtgtacatctctttttcaaccacgtcggtgacttcaccaatcgcacgtttgaatagcggggtctgctctacaatcggcaagcggatttcactgtaaccgtagctgccgagcacgtttttcagtgtgccttcaatgcgctgccagatggccgtttcgccaggcaggtaatcgttcatgccgcgaatggcttgaatgttttttgccacgtttattctctttctgaatataaaaatgaaccctcaacgcttccctcaatgtttcgggagccatgcgggttcaatcatacacgggaagcgaggcgcttcccatcacgttattatttttcaacctgctgaacgtcaattcgacgcgcttcgtccagctgactggctttcgcacgaatgcgtgcttccagctggtcgatcatatcgttgttgtccagacggtctttgcgcacgccatcttcatagaggccgcttttcttgttgccgccggtgacgccgagtgtagaaaccagcgcctcacctgggccattcaccacgcagccgataatgctaacgtccatcggagtgatgatatcttccaggcgttgctccagcgcgttaaccgtaccgataacatcaaattcctgacggctacaggtcgggcaggcgatgaagttgatccctcggctacggatacgcaggcttttcaaaatatcgaaaccgactttgatctcttcgaccggatcggccgccaggcttacgcgcagcgtgtcgccgatgccttcagacagcagcagacctaaaccaatggcggattttactgccccgctgcgcgcaccaccggcttcggtgatccccagatgcaacggctgatcgatctgttttgccagcaaacgataagactcaacagcgaggaagacgtcagacgctttcacgctgactttgaactgatcgaagttcaggcgatcgagatgatcaacatgacgcatggcagattccagcaacgcctgcggcgtcggttcgccatacttttcttgcagatctttttccaggcttccggcgttaacgccaatacggatcggaatgtttttatcgcgcgcacagtcaaccaccatgcgaatacgctcttcattaccgatattgccagggttaatacgcagacaatcgacgccgtattccgctactttcagcgcaatgcgatagtcgaagtggatgtcagccaccagcggcacgttaacctgctgtttgatgagtttgaacgcttctgccgcgtccatcgtcggtacggatacacggacgatatcagcgccaacgcgttccagcgccttgatttgattgaccgttgcttcgacgtctgtcgtacgcgtattggtcatggactgtacggcgatgggagcaccatcgccaatcggcacattcccaacgtaaatacgtgtactttttctacgttgaattggagcctggttatgcatgaaaaatctcccgcgttacccgtctgttactgcgccggactttgttcggcattgagggtcagacgcgcaacctggttagttctgataaaacgactcagatcgacaggtttcccttgatactggatctgtactgcggctggcgcaccaattttcagtttgtacggtgcctggccggttaagttcaaattaccgtctttacgctgcataccgctaaacaattttttaccggtagcatcagtgacctccagccagcaatcggcagtaaagttcatcaccagcgcattcggatcagccaccggcgtggtcacgccagcctgatcggttggcaacggcgcagcaccatctggcgttgttgctgccgttggtgccggggtcgcggcggtatcaacatttgcctggctagggctaacaaccgcattctgttgcggatcaacagctggtgctggcgcagttacggcaggtgtttgcgtgttggttgcggtagtatccacagacgctggcggcgtggacgttgtagccgggtctgtagttgtgctcgtatttaatggaacactctgcccctgctcgctattactgctcagttccgcgctagattgatcggccatagtggtgatctcttcctgctgagctttgcggtcttgccaccaccaggcaccgctcaggccgataaccacaaacaacaccagccaagtgaaggtcatcagccagccgtcgcgttttttgcggcgtttaccgagggaaaaactctgcatcggcgcaacttttgcagcccgaagtggagcctgcttttccagccctggcagcagttcttcttctggaatatgtaccagacgcgcataagagcggatatatccgcgcaggaatgtactagcaagatcggcgggtgccttatcttcttcaatgtcgcgtaccgtggaaaccttcaggcaaagtcgctcggcaacggcctgctgactaagtcctagttgttcgcgagcattacgcaggcgagcgccggtagtaagtgcttcattttggtcgtgcgtggcttcagtattcattcgctgcaggtacgtttaaatgagaattgagatgccggtgaaccatcatgctcacccacaccgcgaaacatccgttaagttaaccgttatcatacagtataagaccgtctgtgtgctcgtgacaaagcccacattcactaaggctaacttactgttgcatcgttacatactgccttaaagtcagcaaaaacgcaccgttaatattgaccagacaattgcaacttaatacttcattcataaaacattacgccacggtacataaagtaaccgtggcgtaatggctatcagaccgctttaatgtcgatggcttcaccctgcatccgtttacgcagggtacgtttcgtacggtcgataacatcgcccgccaactgaccacaggcagcatcgatatcatcaccacgagttttacgcacaatagtggtgaaaccgtagctcatcagcactttactgaaacggtcgatacggctgttgctgctgcgtccatacggcgcacccgggaacgggttccacgggatcaggttgatcttacacggcgtatctttcagcagttccgccagttggtgcgcgtgttcagtgccgtcgttaacgtggtcaagcatcacgtattcaatagtgactcggccctgattggcgttggatttctccagataacggcgcaccgcagcaaggaacgtttcgatattgtactttttgttgatcggcacaatttcgtcacgaatttcgtcgttcggcgcgtgcagggaaattgccagtgcaacgtcgatcatatcgcccagtttatccagcgccggaactacaccggaagtggaaagcgtgacgcgacgtttagacaggccaaaaccgaaatcatcaagcatgatttccatcgccggaacgacgttgttcaggttgagcagcggctcgcccatgcccatcatcactacgttagtgatcggacgctgaccggtgacttttgctgcgccgacgattttcgccgcacgccacacctggccgataatttcgctcacccgcaggttgcggttaaagccctgctgggcggtggaacagaatttacactccagcgcacaccccacctggctagagacgcagagcgtggcacggtcgtcttccgggatatacaccgtttcgacgcgctgatcgccaacggcgatcgcccatttaatggtgccgtcagaactacgctgttcttcaaccacttccggtgcgcggatttccgccacctctttcagtttgccgcgcaacactttgttgatgtcggtcatctcatcaaagttgtcgcagcaatagtgatacatccacttcatcacctgatcggcgcggaagggtttttcacctaaatctttaaaaaactcccgcatctgctgacggttgagatccagcaggttgatttttccatctttcgtggtgacgttttcaggtgtgactaattgttcagacatatgctattccggcctcgttattacacgttatggcccctggagggttgaaaaaagaaacgccccggtgagcggctgctcgtccgggggcgctgcattgtacaaattctggcgcacggatgccacgtttgcacgcggcatttacgaaattattaacgggtgcgcgggcacacttcgccttcgccaaagaaataagcgatttcgcgagcggcagattcgacggaatcagaaccgtgggtaccgttttcggtcaggctgtcagcgtaatcagcgcgcagagtaccagccagtgcgtttgccggattggtcgcgcccagcagatcgcggtgacgctgaacggcgttttcaccttccagcacggaaaccacgatcgggccagaggtcatgaattcaaccagaccatcaaagaacggttttccatcgtgttcagcataaaagccacgtgcctgttcaacggtcaggtgcagcattttggtgccaacaattttgaaccctgcagcttcaaagcgcgcaaagatattaccaatgacgttttttgctaccgcgttcggtttgatgatggaaaaagtacgttcaatagccatttttacctctgtaaattgttctgttgttgtctgtaccagcgtacgagatggcgcggattataatgagcaacagggccgttgactattgatgaaggtaacatttttttaaaataaaatgagttttagcaacaatcagggacaaaacagattattgcatgacaaatttcactgtcgcgatttgccccacgtcatccatcaccagcaattgataatcacctttatccgtcaaatgcagggtcacgttgcgcccgcgttcagttaacggttcgccattcagaaaccaccagcgttcacctgcccctccactactttgcaacggcaaagtcgcttccgctgcgcccggtaaacgtttaataatcgcgccatcgcgaacgcctgtcagctgcagcgggagctgggcatcgtgaccgtatggcgggcaacttgtgctggccggtggtaagcgcacagcgcgacgttcacttgcgggcagccagggttccagcggtagcggccagacatttatcatttcttgtcgcgcttgcgggcaatcagcggcaacacgtttgccattttcatccagccagatggggaaacgaatgccattaatgccttcctgctccggcagtaatagagttggcggctgactcccgtccagcagccaggttgccaggcggcggcgacagttaccgtcaccttccggcaaagactgtccgcccggccagcagataacgccacgagtgacactgttcgggcgcgggtcttccggcagattcgcactgcggctcagtaagatattattgacctgattcaacaatggtacggcactggcaaagccaaactgaccaacaacgggcgtgccgtccggtctgccagtccagatcccaatgacatagcgagcgttaaccccaatcgcccaggcgtcacgatagccatagctggtgcccgttttccatgccagtggggcgacgcgcggcaaggcactatccggcaagggttgcgcttcatcagccataatccggcgaatgatccacgccgccccgctgctcattaaaggccgttcaagcagcggatcgtcaggctgtaagcgcaatttgcctgccttgccgtggcgagcaaacgcggtatacgctgccgccatatcttccagttttgcaccagcgccgccgagaatgagactaagattcggcgcagcaccgttgggcaaatataacggcaatccaacattgcgtaactttgccgcaaaccgtttcggtccataggcttccagcacctgcacagcaggtaagttcaggctgcgcaccagcgcctcgctcatgctgatcgggccatgaaaaccgctatcaaagttacctggtcgataatcaccggtgcgccgggggacgtcttgcagcagacttgccgggtggatcaagccttcatccagcgccagaccataaacaaacggtttgagcacacttcctgggcttcggatgctattgaccatatcaacatgaccaaagcgactatcatcgttgagatcaacgcttcccacccagccgcgaacacgcatatcggtatgatcaaccacgatcatcgccagactgctgcgcggtggcaaccgccctttccagttttgcgccagttcttccagacgtcgttgaagaccggcatccaacgtagtagtgattttgtcgcttttgcttttaccgagcatcatgcggctaaacagcggtgccagttgcggcatttgtcggggggccagccagatgggttcttccctactctcttttacctgctcacgggaccacacaccttgcacggccatccgttcgagcactttattacgcgcggcttcggcacgctccggccaacgatccgggcgaagacggctgggcgcttgcggcaaaaccgccagcattgccgcctcggaatagcttaaattcgcagggctttttccgagataagcccaacttgccgcaccgatcccctgcaacgtaccgccaaacggagcgcggttaagatacaaggtcagaatttcacgcttagacagatgccattccagttgcaacgcgcgccagagctggcgaattttgccgccaaatgttttggggtgaggatcaagcagacgagcaacctgcatagtgagcgtgctgccaccggaaataacccgtccgctagtgagatcttgccatgctgcgcgcgccacgctgaatggattcacccccggatgcttccagaaccagcgatcttcataattgatcagcgcttcaaggtaacgtggagaaacatcttcgattgttaccggataacgccagatgccgtcagcatcggcgaagcgccagagcggcgtaccatcctgcgccacgaccactcgtgcgggattgacttcatgcagcggtagaggccagagtttatctgctccccacgctgcaagaaaaaggagaaagggcgcggctgccaacgttatccagcagccgcgtttggttaacaagcgaggcatttacggtctgacaatcagcagatcttcagccgcgccggtcgcccgccattggggaacatacatactttccaccatcggttgcggtacctgatacgttcccggcgtcaccgcccgcgccagatacaccagcgttaccggttggtattcatcaacggcaaccgccgccacaaagcgatcgtcacggaactcaatgtgcttaatgctcgcctgctgcatctggttcagtaagttctgcacttcgccaccactttgctccaggctggcgctaccgttcgccagattctggttttccagttccagacccgcaggcagcagatccacgactaacgcatccggcacgctgttactggcttttacctgcaaccacaccagcaccagatcgccgctacgtaagctgtccaggcttttgctcttaccatcagtaccaagaatatgacgctcgatttgcagcacattgttcgccggtaaaggtgcggattgcggataaccgctggcatccatacgcaaccataacggctgatcgccactgttgctcacctgcaaggtgacaagttgatcgctattcagattgctgttttgcgctttctcgcctgtcagctgctcagcactgaaagaggtttgcgcctgccatttaccgggtaaatcctgaatcgtacgggcagccaggaacaacgcgttactttcctgcgtgcttagccagcgttcaccaaacgcctgctggctaagtgtgttcagcaaagtgtactgctcatcgggtagcagtttattttcttccagcaaggagagcattaacgcgttgtcgcgcagactactaccgtaatcacccagccatatccgctcatcactattacgcggcgttttcagcgccagcgcaatcgcttcttcaccacgcgtcgcatcacccatggttttcagcgcaacgccaagttgcagcagcggtaaaccagaagcggcatctgcacgatgctcccagatttcacgcagcgcacccagcggagccttttgctgacgggccaacaccagcgcagcgtaagactgtacggcgaatttactggctttgagattatccgcgtacgggatgctcatcatgcccggatcttgtaaatagcgcagcagacgctcattaccccggttaatggcgtctgtcggcacgctgtaaccctgttcgcctgcgcggaccaggaaatccatcacgtaagccgtcagccagtactcttcgtcaccgtttttatcccacagcgcaaagccgccgttatcacgttgcatttgcagcaaacgggaaatgccgatatcgacgcttgcacggcgtttctcatcactgtcgcctttgatgcccaacgcctgcagttgggctgcgttggtataaagactcggaaacaggccgctggcggtttgctcaagacagccgtacggatacgcttttaactctttgatataacgtgcgatgttcagcggtggtttgccgctcaacaacaattgcccttccagcgtaacagggctgaagttttgcaatccatccgccggaatcgcccatgtctcaccaggctgtaacgccgtaccgtaattaaccgtttgtgccgggaacgccggacggacgccgattttccactgcttatgctgatcggcaacggtttcacccggtaacgctaacccgctaatggtggcctgaatttctccatcgccataacccggcaatgctcgcaccgggataaacagcgtagtacgcacacctggcgctaattcaacggctgcgggactatcgctgaccagttcaagcaaaccactggcggtcagggcaacgttcagtttttgcggtttatcggtaagattagtgatatccagcgtcagacggctggtatcgccactcgccataaagcgcggcatgttcagttcagcaatcaccggtgcggcaactatcactttactttcgttgctaccgaagtcatctgccgtccaggcttgcgccatgacgcgcaattcaccgttaaaatcgccaatcggcagtgtaacgctgccttcgccctgttcgttgagcgttaccggcagcgcctgctgcacgacaatattgacgtgattgaccggcggtttaccaccacgtttcagctcatcaccatcgccaccgaaacgcagagctgccagacgcccctgaccttcaataacctgaccgtaaatatcgtaaatgtctgcgccatagcgtttctgaccaaagaacgcctgccacggatctggcgtgacgtagtcagtaatattcagcacaccactatcaacggcagacaccagcacattcacctgtttaggcttctcgccatttttagtgctggctttaattttcacggttaatggttgattgggacgcatttttgctggtgtttccagcgccagatcgaggcgacggttttcatcgccaagcggcagatgcaacacaccaaccgcgcgttttggcgtcgcggagcgagatttatcgccaggacgtaccaccagcgtacttaaatacagatcatgacgattccaggttttatcgaccggaatcgtcagatccagcccttgagcccgaacatcaatctcttgccaccacagcggcccttcactggactcgaccatcgcataacctttacccgccgttggcgcggcgatatgcaacttaatggtgtcgccagggcgataactggctttatccagtttcagcgtgacacggtcgggtcgcactgcgccgctaccgtcgctgttgtcctgccagctatagccagcccagaaacgaacactactgaccgcttcattcggcgctttgacttccagacgataagcgccccactctaccggaaaactgaccttgccggtttcgtccgctttcagatccagagtttgttcattttcgatcagatctttttgatcaaactgactctgccagccttcatcttcactccagttccagtagtaatcgcggcgttcgcgaatcaggcgcacctgcaagccgctcacggcttttttcacgccttgcgcatcgctataaacgatgtcaaaagcggcgttactgccttcatcaacaatgggctgtttcaccgtgctgtcagtacgataatcgtaaacgcttttgctggcgaactgcggacggatccccggcaatgcatcggcaggccagatagcctgctcagcgcggcgcgtcaccgggcgaccgccgctttccagcaaactaccctggaaaataacctgtaatggggaatgcgtttccttccactggctttctgtagaaacttcgccgcgccctttatcatccagcgtcaactgaacttcatccagcgtgcgggaaagattttcggcagctatatcgccgaattcaaaaccaggtaaggcactcacagcttcacgcagtgggcgcaggaaaagttgcccttgcaaagtattaccattagcaggtgcaccatacaggtagtaccccaccacggagaatttcacttcatctttcggcgttagcggggttttctcaccggtcagattcagcgccatgcgctctggcataaaatcttcgacgtggaaatcccacatccgatactgattatcgcccgtgttagcgcgaatatgccacataccggttgccgcattgctatcgagtggccaggtaaagtggtagaggccattctccggctgactaacgacgctcctgagtacctgcccatcgggtttaatcacgtctaacttgatgggttgattgggcaacgctttaccgtctgcatcacgcagcaaaccattgaggattaccgtttcacctgggcgataaagatcgcgtgggccaaacatgaaaaactgtttgctatagcctggcgcgccagcaatgttaaattctgctaagtccagcgccggaagttttaaatcgagtagcgttgtctgaccgtctttacgcgccaacagtaatgccgcgtttttatcattttccagctgcacatgcccctgagcgtcactggttgcctgagtcagagtctgccctttctcatttaataaagagacttcaattccttgctgggccgcgccgttttccagactttgggtaaagatatccagacgattgtgataacggtgagcactaacgccgatatcacttaacgtaaacagcgtcgcgggattactgtaatcgtaacgtccagcctgattcatcacagccagatacacgcccgcctgctgaagcggtttgatatcgcccagcggcagcaataatttttcacgggtgttacgcgcaggattgagatcaaaccgtccggtgtagaccagatccgccatctgcagcagtttgtcactctgccagttcgccaggctattgcggtattcccattggctaatgaatgctggcagagattctggcttaacgcggaagaagttaacatcgacattattaacgttgagcgccattaccggcagcccttcaacgactttgccaggcagcaggctaccacggctggcaaaaccgacgctgggttggatgtcgcgggtagttatagttttttcgtaatctttactgaaggttgcgttgttgagtgctttgacctccttgccaatagtaacgatcaaatcacgtttcggttcgaggtggcgtaaacgtaactctttaagattatcactcagctcccaggcaccatccactttgccgctttttttatcgacgacatgaataacgcgactgaaatcctgatccgggtcgagagggatggagaacgtcagcaccagcgtggctgcaccatcaagttggacttcagagagatccagcaatgtcagcaccttaccggcactctgttgggccagtttttgtctctccggcacggagagttttgcactactcgcgttttcactagaggccgctttagtaacttcagaaggcgcatcttttttcaccgctgttggcgcgttatcgttgttgtcgcaccctgccagcgccagcattagcatgcaggcggctacgcgtaactttttcatttttcatccctgccacaatggcccgttagcaacgtcgaataattattatgcgtgagaatttacgttatgtaattcagtatcacgcccatacaatccgaattttagtgagaattgtggctcagacagccaaatcagcctcttttgcttgtcgcttttcactaaacatccgacaatttagcctaaccccggcaaaaatggagatgcctatgtccacgacatggtttgtaggagccgactggctcgccgaacatattgatgacccggaaattcagattatcgatgcccgcatggcgagccctggacaggaggatcgtaacgttgctcaggagtatctgaatggacatattcccggcgcagtgttttttgatatcgaagcgctttctgatcacacttccccgcttccgcacatgctgccgcgcccggaaacgttcgccgtggcgatgcgtgaattaggcgttaaccaggataagcacctgattgtctatgacgaaggtaatcttttcagtgccccacgagcatggtggatgctgcgcacctttggtgtagagaaagtgagcattctggggggtggacttgcaggctggcagcgcgatgatctgctgttagaagaaggtgcagtagagctgccggaaggagagtttaacgccgcgtttaatcctgaagccgtggtgaaagtaaccgatgtattattggcaagccatgaaaatacggcgcaaattattgatgcccgcccggctgcacgttttaacgcagaagttgatgaacctcgcccaggtttacgtcgcggacatattcccggagcactgaatgttccgtggacggaactggtgcgcgaaggcgaactaaaaacgaccgatgaactggatgcgatattttttggtcgcggcgtcagctacgacaaaccaattatcgtcagctgcggctctggtgtaacggcagccgtggttttgttagcactcgcgacgctggatgtgccaaacgtgaaactgtacgacggcgcatggagtgaatggggcgcgcgggcagatttaccggttgagccagtgaaataagtattttacaggcaataaaaaaccgccgaatttggcggttttttattgctagtctggttcgcggcctttccagcaggttgacttgtgttacatgagcaacgcaggtgcttcacagcaaaacaatactcaccagtaactctctttttgtcaagcaaaagagagtaattattgtttatttagcgtattatcgacaccggccctttccgccgtgttcggtaataaaataacctggcttattagtccgaattcagacaaatataaataaatcctgctcaaaattaaaaattctaaccggtaaaagatattacttaaacatgtaaattcactttcctttaaaaaacaaaaaaccgccaaaatcaggcggttttttgttgctggtccggttcgcggcctttccagcaggttgtattaccgtagtaatgcaagcgcgtctcagcggagacaatactcgccagtaactctctttttgtcaagcaaaagagagttattattgttctgttagtgtattatccactgcggccctttccgccgtctcgcaaacgggcgctggctttaggaaaggatgttccgtggccgtaaatgcaggtgtttcacagcgcttgctatcgcggcaatatcgccagtggtgctgtcgtgatgcggtcttcgcatggaccgcacaatgaagatacggtgcttttgtatcgtacttattgtttctggtgcgctgttaaccgaggtaaataataaccggagtctctccggcgacaatttactggtggttaacaaccttcagagcagcaagtaagcccgaatgccgccctttgggcggcatattttagattatccgattctgtttaaagtcacgcaaaaaaccaccccagcgacgttcatagaatggcgcaatatgttcggtaataaagtggctaattcctttttccccttttttcacctgacaaatatcgattggttcatcgccaggtaatgtatcggtcgctacacttcccgtcgcctgaataatttcttcgatatcaccatcggcttcaatgccaataagtaaattaggctgtgcctcttcgttctctttaatactacaaataaaagcacgcttcaccggcttaatggttttaaataaggtggtgagactatcaatcatttgtgctggcggctctgcgacttcgcttaatatcaggctttcaccgccttccaggatttcctggctgctcagcggatttccctcttcaccaatcaacaaactgatttcacgcggcataaattctttaccggttggcagtttggcattaaggaagagcgtttcgccaagtgtcatctcaaacagcgtgcgaacgggcattacgacaaatgcctgttcgtcttcaaccgcctgttgaagtgcttctaagctggtgaaaaaaggaatgacgctggtgccgtcttctttttcccagtgctgtaaatcaagcgcgctatcttcaaccacagcctcgccctgcgccgccgtaccaggcacccagacggtggattccagtagagtacggaaaaaggccgggcggtgcgccggttcagttgctgctttttccagcaggtcttcaagttcgttttttgtttcggacataagaaccacaattcattcaacgttcggggcgcaaatgcctgatgcgctacgcttatcaggcctacaagggattcgcaatttgttgaatttgcagaatttgtaggccggataaggcgtttacgccgcatccggcatattagtttacgccgttaacagattagctatcgtgcgcacaccaagtcccgtagcgcccgcagaccactgttcaaccggcgctttacggtaagtcgcgctgcagtcgatatgcagccagccttgctgatagttctcaacaaagtggctcaggaagcccgccgccgtgctcgcgcctgccggatacgccgcgcttccggtattgttcagttcggcaaagttagacggcagctggctgcggtggaactccgccagcggcagacgccagaacggttcgttctcctgcgcggcactcgccagcaagcgaccggccagcgcatcgtcaaaactgaacagcgcgtgataatcattacccagcgcagttttcgccgccccggtgagggtcgccgcatcaatgatcatttccggtttctgcgcactggcatcaatcagaccatcggcaagcaccagacgcccttcggcatcagtgttcatcacttcaacttttttaccgttgcgataggtgatgatatcgcccagcttgaacgcattgccgctaatcaggttatccgcacagcagaggaacagcttcacgcgcttgttcagtccgcgcgtaatggcaaatgccagcgccccggtaaccgttgccgcgccgcccatgtcgctcttcatgctgtccataaacgcagtctgtttgatgctgtagccgccggagtcaaaagtgatacctttacctaccaggcacgcgtacactggcgcttctttatcgccagttgggttgtaatccagcgccagcaataccggagaacgttcactaccgcgtccgactgtgtgcagccccatataaccttgctcacgcagatcttcgcctttggtgatccgataagtcacacgatcgcccgcgacgttgctgatcagatcaacagcacgctgtgccagttggcttggtcccaattcttctgccggtgcgttgatggtgtcacgcacccagtcgatgatcatcaggcggttatccagttcctggcgctgggcatcgtccagatccggccacaccactttacgcgtgcctttcggggctttgtaaccttgccagaatgcccagcagcgatccgcatcccagccttcaccgcttaactgaacatgcttgatgcccagaccgtcaatcttgcgcgccgcacgctggatcagccccagatcgtctgccccgttcaaatgcagggtaatgccgtcattattaatgctgtaagttgctttttctccccagcgcgcgtcggcaggttgggtagagagggtaatcttcatcgcttctgtcattttagttatccttctttgtaaaagggccgccagttggcagccccaggatttttccgctaaatgattcgcgttgcaggaaggcggcaagtgagtgaagccccaggagcatagataactatgtgactggggtgaacgagcgcagccaacgcatctgcggcgtgaagcatgacgcggaaattattcggcctcgtccagccagactaacaaaatcgcttcgaggattttctcgttggatgcctgcgggtcgtcgtcgaaatcttccagatcgcaaatccactgatgcatatcggtgaatcgaaccgttttcggatcaagatcgggatacgcatcgtacagtgcttcgccaatttcgcggctatcggtccacttaagtcccatactaacctctgttaatgctcacgcgcatggttgatagtgtaacgcgggatttcgactactaaatcttcgtcggtaacgcgcgcctggcagcttaaacggctttccggctccagtccccaggctttgtccagcatgtcgtcttcctgctcactgctttccggcagactgtcaaaaccttcacgaacgatgcagtggcaggtggtgcaagcacaggatttttcacaggcgtgttcaatctcgataccgttacgcagagctgcgtcgagaatggtttcaccgctattagcttccagaacagcgccatcagggcagagatcctgatgaggcaaaataacaatctttggcatattaaacctcgtccacggaatggcctttcagcgcacgacgaacgctctggtccatgcggcgagcggcgaaatcctgggtttgtttgtctacgtttttaatcgcttgttcgatggcgtcaacatcatcgccctgcgccacttcactcaggtgagcggcagcatcgtcaatgacctgacgttctgcggcgcttaacagcgcggcatcagcagccagcgcgccgtgcagactttccagcacacgcgccgcttctactttttgttctgccagcattcgggcttttacgtcctgctcggcatagctcatactgtctttgatcatgctagcgatttcgctatcggtcagaccgtaagacggtttgacctgaatagacgcctcaacgccggtggatttctccatcgccgtcacgctcaaaagaccgtcggcatcgacctggaacgtcacgcgaatatgcgcaccgccagccggtagcgccggaataccacgcagcgcaaaacgcgccagactgcggcagtcctgcaccagttcgcgctcaccctgcattacatggatagacatcgccgtctgaccatctttaaaggtggtgaaatcctgagcgcgggccaccggaatagtggtattacgcggaatcactttctccaccaggccgcccatcgtttcgaggcccaggctcagtgggatcacatcaagcaacagcatttcgctgtctggcttgttacccaccagaatatccgcctgaatcgccgcgccaatagcgacgactttatccgggtcgatggaagtcagcggtggacgaccgaaaaattcgcctacccgttcacgcaccagcggcacgcgagtagaaccgcccaccatcaccacttccagcacttcatcagcttctacacccgcgtctttcagcgcgcgacgacaagccagtaaggttcgttttaccagtggcgcgatcagttcattgaattgttcacggctgatttcgccctgccagcccgcaacgttaacggtcacggagtccgcatcgctcagcgcgattttggctgcaatggcggcatccagcagttcacgctgaacgcggttatcgctacgatcaggaatgcccgcctgctcgcgaatgtaatccgccagcagatggtcgaaatcatcgccgccgagcgcggaatcaccgccggttgccagcacttcaaacacgccgcgacttaagcgcagaatggaaatatcaaacgtcccgccaccgaggtcataaacggcgatcacgccttcctgaccggaatccagcccgtaggcgatagccgcagcggtcggttcgttaagtaagcgcaggacgtgaaggcccgccagacgcgccgcgtctttggtgccctgacgctgggcatcgtcaaagtacgccggaacggtgataactacaccatccagctcgcctgccagggcttcagttgcccgcgccgccagtgctttgaggatgtccgcagaaacgcgcaccgggttcagcagccccgccgccgtttcaatcatcggcaggccgttttcgctggcctggaattgataaggcagatgcggatagcgttgctggatatcagccaggctgcgtcccatcaggcgtttaacagaactaattgtgttggcggtatcgagcgctgcattagtacgcgcgtcataacccacgctatgcccttgctgttgatagtgaacaacagatggcagcaggtgacggccttcatgatcggctaacgtttcggcctgaccgctgcgcactgtcgccaccaggctgttggttgtgcccaggtcaataccggccgccagacgacgctgatgcggcgcagcactcaaaccaggttcactaatttgtaataaggccatgtttagcttccagaaattaaaaatcgagcagtttttcttcgagttgttcggcactgcttcgcagtttatcgagaaaacgcagcttacgcacggtatccgccgccgcgtcccacgtctcgttgtctaactgttcaaccatcaactgatggcgggtatcaaacatctttttcacacgtttgataaagctttccagccgcgcttcatctttcgcctgttcgatctcgtccagctcttcgcgcagctccaactgttccatcaggaacgcggtgtcgcgcacagtatgctgctcgctggcgagatcaaagccgtgcaaagaaagcaaatattccgcgcgcattaacggatgacgcagcgtttgccaggcctggttaatggttgcagattgctgtacggcggcgagttgttccgcctggcttccgctggcgaatttatcaggatgatactgacgttgtagatcctgaaaacgcaggctcagcgcctgggtatcgagttgatagcgggcaggcaagccaaagagggtgaagtaatccataacattctcagggctgcgatccgccgcgataacggcgaatcaggtaaaacaaaccccacgcgcaggcgaccacggtggggttatcggtatgcgcatcaaacgtggaagctttcgccgcaaccacactcatctttgacgttcgggttggtgaatttaaacccttcgttcaggccttcttttacgaagtccagctgcgtaccgtccagaaattgcaggctcttgccatcgaccacgactttcacgcctttgtcttcaaacacgatgtcttccggcgtcggttcgtcaacaaattccagtacataagccataccactacacccggaggttctcacgcccagacgcaggccaaaccctttaccgcggttagccagaaaggtatttactcgcgctgctgcactgtcgctcagtgtaatgctcataaccaaacctcaactcttattttgcttcacgtttgcttttatagtccgcaatggcggctttgatcgcgtcttctgccagaatagaacagtgaattttcaccggcggcagttcaagttcttcagcaatatcggtgtttttgatcgcctgcgcttcgtcgagagacttccctttcacccattcggtgaccagggagctggaagcgatagcggaaccgcagccgtaagttttaaaacgcgcgtcttcaatgataccttcatcgttgactttaatctgcaacttcatcacgtcgccacaggccggtgcccccaccatgccgctgccgacgttctcgtcgttgttgtcaaaggaacccacgttacgcggattctcgtaatggtcgataactttttcgctgtaagccattataaattctcctgattccgataccgattaatgatgagcccattcgatgctgttcagatccacgccctgcttgtacatttcccacagcggagaaaggtcacgcagacgaccgatggatttacgaactaactcgatggtgtagtcgatctcttcttcagtagtaaaacgacctaaagagaaacggatagagctatgtgccagctcgtcgttcagccccagcgcgcgcagcacgtaggacggttcgaggcttgcactcgtacaggcggaaccactagaaactgcgaggtctttcagcgccataatcaggctctcaccttcaacgtagttgaagctgacgttgagaatgttcggcgcaccgtgttccaggtcaccgttcaggtaaacttcttcgatatctttgatgccgttccacagacggttacgcaggccgcgcagacgttccatctcggtcgccatctcttcttttgcgatgcgataggcctcgcccattccgacgatctggtgaacaggcagagtgccggaacgcataccgcgctcgtgaccgccgccgtgcatttgcgcttcgatgcgtacgcgcggtttacgacgtacatacagcgcaccgatacctttcgggccatagattttgtgaccggagaaagacatcaggtcaactttcaactggctcaggtcgataggcagtttacccacgctctgggttgcatcaacgtgatagataatgccacgagcacggcacatttcgccgatagccgcgatatcctgcaccacgccgatttcgttatttacgtgcatgatggacacgaggatggtgtcgtcacgcatcgctgcttcaagttctttcaggtcgataatgccgttacgctgcggtgccaggtaggtgacttcaaaaccttcgcgctccagctgacggcaggtatccagtaccgctttgtgttcggttttgctggtgatgatgtgcttgccttttttctgataaaagttggctgcacctttgatcgccaggttgtcagattcggttgcaccagaggtaaagacgatttcacgcggatcagcgccgaccagatcggcaatctgattacgggcgatatctaccgcttcttcagcctgccagccgaaacggtgagaacgggaggccgggttaccaaaggttccgtccatcgtcataaactgcatcattttctcggcaacacgcgggtccaccggcgtggttgcggagtagtcgagataaatcggtaatttcattgctctataaactccgtacatcactcaatgcaaggaatcaggctaccggctggatgtacgaccgtgtttacggagtatttagcactccggcctgattctgaattctttttattaagcgcgtaacttaacgtcgatcgcgtcttgtgtgcgggtgcgtggcgcgtcgtgagtatgctgacgaccagacacatccagcacttcctggttattaaccagttcgcctaaagtaatgttgttgagaaaaccggtgagacggtcgctcaaatcacgccacagcgcgtgggtcaggcatttatcgccgccctggcagccgcctttaccctgacaacgggtggcatctacagattcgtcaacggcgctaattacttcgccaacggcgatgctgctggcatctttgcctaacagataaccaccgcctggtccacgtacgctggaaaccagaccatttttacgcagacgggaaaacagttgttccagataagaaagggaaattccctgacgttcggaaatatcagccaacggtaccgggcccgcttcagagttgagcgcaacgtcaagcattgcggtcacggcatagcgccctttagatgtcagtctcatgtcttacttcacctcaaactcgcccctgcccggggttttttattgtaaaagtgggggtattgcatagcagggtcaagtctgacattcccgagtaaattggtcaactatttacttgactgatttagtcgggtatttaaccttcagtgccatttttttatcgtggcgtttgtacctgttgtcggatgcggcgtgaacgccatatccgccctggggttctgtacactgtaggcctgataagacgcattacgcgtcgcatcaggcaacggctgtcggatgcggcgtgaacgccttatccgacctacggttctgttcactgtaggcctgataagacgcattacgcgtcgcatcaggcaacggctgtcggatgcggcgtgaacgccttatccgacctacggttctgttcactgtaggcctgataagacgcattacgcgtcgcatcaggcaacggctgttattcggccttgttacctttattctgctgctcaatagaagccagaatcccgcgcaggatattcaactcctggctttccgggcgcgcacgggtaaacagacggcgcaatttattcatcacctgccccggatggttttcacggataaaaccggttgccagcagcgtttgttccagatgaccataaaaacgctccagatcatcgaccagcggatacggcgtctcttcatgctcgacctgctcgccgttttcctgagttgccagccaggccatgcgcacttcataggcaataacctgaaccgccatcgccaggttcaggctgctgtattccgggttagccgcaatcgcgacatgataatggcatttctgcaactcttcattggtcaagccgacgcgctcgcgaccaaacaccagcgccaccggggtatttgccgcttcagcgacgcttttcaggccgcattcgcgcgggtcgagcatcggccatggcagcgtgcgggaacgtgcgctggtgcccaccaccaggctacaaccggctaacgcttcgtcgagcgtatcgacgatgtgagcattaccaatcacatcgctggcccctgctgccagggcaatcgcctgggagtcgggtttcaccagtggattaaccagccacagattggttaatcccattgttttcatggcacgggcaacagaacccatattgccggtgtgactcgtctccaccagcacaattcgaatattttgcagcattgtctttcttcatctaaagattattcacgcatcttatcataaaacgaagacagatgccgatctcgctgctatactctgcgccgttttcccgttctttaacatccagtgagagagaccgatgcatccgatgctgaacatcgccgtgcgcgcagcgcgcaaggcgggtaatttaattgccaaaaactatgaaaccccggacgctgtagaagcgagccagaaaggcagtaacgatttcgtgaccaacgtagataaagctgccgaagcggtgattatcgacacgattcgtaaatcttacccacagcacaccatcatcaccgaagaaagcggtgaacttgaaggtactgatcaggatgttcaatgggttatcgatccactggatggcactaccaactttatcaaacgtctgccgcacttcgcggtatctatcgctgttcgtatcaaaggccgcaccgaagttgctgtggtatacgatcctatgcgtaacgaactgttcaccgccactcgcggtcagggcgcacagctgaacggctaccgactgcgcggcagcaccgctcgcgatctcgacggtactattctggcgaccggcttcccgttcaaagcaaaacagtacgccactacctacatcaacatcgtcggcaaactgttcaacgaatgtgcagacttccgtcgtaccggttctgcggcgctggatctggcttacgtcgctgcgggtcgtgttgacggtttctttgaaatcggtctgcgcccgtgggacttcgccgcaggcgagctgctggttcgtgaagcgggcggcatcgtcagcgacttcaccggtggtcataactacatgctgaccggtaacatcgttgctggtaacccgcgcgttgttaaagccatgctggcgaacatgcgtgacgagttaagcgacgctctgaagcgttaatgactcaggcgggtgatatcactcacccgccctcgcctttcaggcgctattccgaaatacttcctcactgctttactttctttcgtcactctcccaccatctttccccgattaatggatgataaagaagagccaaggaaaggttatggcactgccagtgaacaaacgcgttcccaaaattctgtttattctctttgttgttgccttctgcgtttatttagtgccgcgcgttgccatcaacttcttctattatcccgacgataaaatttacggtcccgatccctggagcgcggaatccgtcgaatttacggctaaggacggtactcgtctgcaaggctggtttatcccttctagcacgggccctgctgacaacgccatcgcaaccatcattcatgctcacggcaatgccggaaatatgtccgcccactggccgctggtcagttggttacccgagcgtaatttcaacgtttttatgtttgattatcgcgggtttggtaaaagtaaaggcacgccgtcccaggccggattgctggacgatacgcaaagtgccatcaatgtggtgcgccatcgcagtgatgtaaacccacaacgtctggtgctgttcgggcagagtattggcggggcgaatattctggatgttattggtcggggtgatcgtgaaggcatacgtgcggtgatcctcgactccacatttgcctcttatgcaaccatcgccaaccaaatgatccccggcagtggctacttacttgatgagagttacagcggcgaaaattatatcgccagcgtcagcccgatcccgcttttactcattcacggtaaagctgatcacgttatcccatggcagcacagcgaaaagttgtatagcctggcaaaagagccaaaacggttgatcctaatcccggatggcgaacacattgatgctttttccgatcgtcacggcgatgtttatcgcgaacagatggtggactttatccttagcgcgttgaatccgcagaactaacccatgatcgctagcacgataatcattcacaaaaccaccttaagacatgctaatccactggtcagaacagtttaagatgagaaaaattctgtgacgcttgccaacatttctgatgattagcattcccttcgccatttccttgagcaaactttagctattcttatcaattatgcttatgggagatctacagatgatgcctacgcttgctccaccatctgtccttagcgctccccagcgccgctgccagatcttgctgacgctctttcagccggggttgaccgccaccatggcaaccttcagcgagcttaatggtgtggatgatgatattgccagtcttgatatcagcgaaacaggacgggagatcctgcgctatcatcaactcacactgacgactggttatgacggtagctaccgggttgaaggtacagtgcttaaccaacgtttgtgtttatttcactggctacgacgtggtttccgtctgtgtccgagttttattaccagccaattcacccccgccctgaagagtgaactgaagcggcgcggaattgcgcgtaacttttacgacgataccaatctacaagcgttagtgaatctctgctcccgacggctgcaaaaacgctttgaaagccgcgatattcatttcctgtgtctgtatctgcaatattgtttgctgcagcaccacgctggaattacgcctcagtttaatccgctccaacgtcgctgggcggaatcctgccttgaatttcaggtagcgcaggaaattggacgccactggcagcgtcgggcgctccagcctgtaccacctgatgagccactgtttatggcactacttttttccatgttgcgggttcccgatccattgcgggatgcgcatcagcgggacagacaattgcgtcagtctatcaaacgtctggtaaaccattttcgtgagctgggaaatgttcgtttttatgatgaacaggggttatgtgatcagctttatacccacctcgcccaggcgttaaatcgcagtttgtttgccatcggtattgataataccctgccggaagagttcgccagactgtacccacgcctggtgcgcaccacccgcgcggcgctggccggatttgaaagtgaatacggcgtccatctttctgatgaggaaagtggtctggtcgcggtgattttcggtgcctggctaatgcaggaaaacgatctgcatgaaaaacagattattcttcttaccgggaatgatagcgagcgagaagcgcagattgagcagcagttacgcgaactaacgttactgccgctcaacattaagcatatgagcgtaaaggcatttttgcagacaggcgctccgcgtggcgcggcactgattattgcgccttataccatgccattaccgctctttagtccaccgctgatctatacggacctgacgctgacaacacatcaacaggagcagatccgcaaaatgctcgaaagtgcatgatcagcaactgggaacaactttcgggcgcaaaaacattgccggaagcgccaccagcgccattacccagaacacgccgtggcccagatattgatacaggaaaccggcgaaaacggtcatgatagcgatactgccgcccatcgcgacggcagagtaaaccgcctgtaaacggatgacttcgctaccctggcgagcagcaatataacgcatggcggccaggtggcagaccgtgaaggtgccgcaatgcagaatttgcaccactatcaaccacggcaacgccgtagttgctcccataatgccccagcgcactacgccgcaaatcgcgctgatcaacagcatatcgcgtgcactacaacggcggaaaagtttattactcagcgcaaagataatgacttccgccaccacgcccaggctccacaaataccccaccgcgctggcgctgtagccagctgcctgccagtaaatggcgctaaaaccgtaataggccgcatgtgccccctgcaataaacaaacgcaggccagaaagcgccagttctggcgaaccagcgccaaccacgcagaccaaccggtgctctcctgctggcgacttgccccttgtggctgaatcgtcggacggatgagaaagccgagcagcatggatgccacgcccaacgtcaacagcgcgaggatcacccgataatcaaacatagtgaccagtttgcccgtcagcgcgctgccaatgacaaacgccacgctgccccacagtcgcactttgccgtaatcaagcgggaactgcttttgccacgtattcgccagtgcatcggtcaacggtaccagtggactgaaaaagaggttaaagccaatcatcaccagcatcagccacgctacgtgcgcccccgcccagaaggcgacagcaaagagaagtgtcagcagtgccagcacgcgcaaggcggaaatcaggcgggaaggatcgctgacgcggggcgcgatgagcaaactcccgaggaaacgggcaaccagacctgcccccaataacaggccgatggtttctggcgttaaaccaatccctttaagccagacgctccagaaaggtagaaaaatgccgtaactaaaaaagtatgtgaaatagccgagcgccaaccagcgcgtggattgcaaaaccatgagtccctcccgtcaggaggcgttagtctggggttaatcgaatgttggtgcaagttgaaaaataagaatattcgagcctgcttcccgatgtctgtaacgccagttcacaagcactaaaaaactgagatccgcgacgcatgttgcaaaaataatgcgtaattatgccgttacgcttgccaaacgttcctgcacaatggcgatgaaatcgcgtaatgccggcttcatctcccctttcttccacgccatcagtaaagcaatggaaggcacatttccggcaatgggacgaaaaacaacctgtccggtattaaaattattcatataaccgggtatcaaagtgacgcccagccccatgcccaccagattcatggtcaccagaatattcgttgccacctggacgatatttggctggctgttttcttgcgcaaaccacgctttaacgatcggcgcaaggctaccggaatacaccggatcggtactgacgaaattcacgccatccagttgcgcggcggtgatctctttttcatgtgctaaagggtgatcaaccggtaacacaaccactaatggttcgtcaaaaagctccagataatcaatctccgggctataaacaggatggcgcattaagccgacgtcgagttcaccacggcgaattttttcctcctgttgcgtggtgattaaactcaccagctcaatcaaggtgtctggctgtctgagacgaaacatcggtaatacttttggcagtaaattcacttccgcgcttggcacaaagccaatggttaattgtctgtcttcctgaacaattttccgcgcccgtaatttggcattttccgcttgttcgaggattgccagcgcgtcctggagaaaacattctcccgccgccgtcaacgcgactttgcgcttatccctcaccagtaacggaacaccgacacagttttcaagatcgcggatctggctgcttaagctaggctgactggtatgcagtttttccgccgcacgggtaaagttcagtgcctgcgccactgcgacgaaatagcgtaaatgccgtagttccatcaccttccccttgttatcgaaaaaacgtctcagctggtagaaattaactatttcacatattagcaaccaaccagcaacatccttatggcacaaaaatagaaggtcaatacatcttatctttcaggattaaaaaatatgaccacacccagtgatttgaacatttaccaactgattgacacccaaaatggtcgggtcactccgcgtatttataccgacccggatatttaccaactggagcttgagcgtattttcggtcgttgctggctatttctcgcccacgaaagccagatcccaaaacccggtgatttctttaacacctacatgggagaagatgcggttgtcgtagtgcgtcagaaagacggcagcatcaaggcgtttctcaaccaatgccgccaccgggccatgcgtgtgagttatgcagattgcggcaacactcgcgcctttacctgcccgtatcacggctggtcttatggcattaacggcgagttgatcgatgtaccgctggaacctcgcgcctacccacaagggttgtgtaaatcccactggggactaaacgaagttccttgtgtggagagttataaagggctaatttttggcaactgggataccagcgcaccgggcctgcgtgattacctgggtgacattgcctggtatctggatggcatgctggatcgtcgcgaaggcggcaccgaaattgtcggcggcgtacaaaagtgggtgatcaactgtaactggaaattcccggcagagcagttcgccagtgaccagtatcatgctctgttcagccatgcttctgccgttcaggtattaggggcgaaagatgatggcagcgataagcgcctcggtgatggacaaaccgcccgcccggtgtgggaaaccgccaaagatgcgctgcaatttggtcaggacggtcacggtagcggtttcttctttactgaaaaaccggatgctaatgtctgggtcgatggcgcagttagtagctattaccgcgaaacctatgccgaagcagaacaacgtttaggtgaagttcgcgccctgcgcctggcgggtcataacaatattttccccacgcttagttggctaaacggcactgccacactccgcgtctggcatccgcgcggccctgatcaagttgaagtgtgggcgttctgtattactgacaaagccgcctccgatgaagttaaagccgcttttgaaaacagcgccactcgtgcttttggtcctgctggttttctcgagcaggatgacagcgagaactggtgtgaaatccagaaattgcttaaaggccaccgcgcccgcaacagcaaactgtgtctggaaatggggcttggtcaggaaaagcgccgcgacgacggcattcctggcattactaactatatctttagtgaaactgccgctcgtggaatgtaccaacgctgggccgatcttctgagtagcgaaagctggcaggaagtgctcgataaaaccgccgcttaccagcaggaggtgatgaaatgagtgcgcaagttagtctagagttacatcaccgcattagccagtttctctttcacgaagccagcttactggacgactggaaatttcgtgactggctggcgcagctcgacgaagagattcgttacaccatgcgcaccacagttaacgcgcaaacacgcgaccgccgcaaaggcgtccagccaccgacaacctggatttttaatgacaccaaagaccagctggagcggcgaatcgcccgtctggaaacgggcatggcctgggcagaagagccgccgagtcgcacccgtcacttaatcagcaactgccagataagcgaaaccgacatcccaaacgtatttgctgtgcgggtaaattatctgctttatcgggcacaaaaagagcgcgatgaaacattctatgttggaacgcgtttcgacaaagttcgccgtctggaagatgacaactggcgcttgctggaacgggatatcgtcctggatcaagcggtaatcacttcccataacctgagtgtactgttctgatgaatcgaatttatgcgtgtcccgttgcggatgtgccggagggtgaggctctccggatcgataccagccccgtcatcgccctgttcaacgttggcggcgagttttatgccattaacgatcgttgcagccatggtaatgcgagtatgagtgaagggtatctggaagatgacgccacggtggagtgcccgctacacgccgccagtttttgcctgaaaacggggaaagcgttatgcctgcccgccaccgatccgctcaccacttatccagtacacgttgaaggtggtgacattttcatcgacttaccggaggcgcagccatgagcgatctgcataacgagtccatttttattaccggcggcggaagcggattagggctggcgctggtcgagcgatttatcgaagaaggcgcgcaggttgccacgctggaactgagcgcggcaaaagtcgccagtctgcgtcagcgatttggcgaacatattctggcggtggaaggtaacgtgacctgttatgccgattatcaacgcgcggtcgatcagatcctgactcgttccggcaagctggattgttttatcggcaatgcaggcatctgggatcacaatgccagtctggttaatactcccgcagagacgctcgaaaccggcttccacgagctgtttaacgtcaatgttctcggttacctgctgggcgcaaaagcctgcgctccggcgttaatcgccagtgaaggcagcatgattttcacactgagtaatgccgcctggtatcctggcggcggtggcccgctgtacaccgccagtaaacatgccgcaaccggacttattcgccaactggcttatgaactggcaccgaaagtgcgggtgaatggcgtcggcccgtgtggtatggccagcgacctgcgcggcccacaggcgctcgggcaaagtgaaaccagcataatgcagtctctgacgccggagaaaattgccgccattttaccgctgcaatttttcccgcaaccggcggattttacggggccgtatgtgatgttgacaagccggcgcaataatcgcgcattaagcggtgtgatgatcaacgctgatgcgggtttagcgattcgcggcattcgccacgtagcggctgggctggatctttaaggaagcacgatgaaagaaaaaacgatcattattgtcggtggcgggcaagcggcggcaatggctgcggccagcctacgccagcaagggttcaccggtgagctgcatctgttttccgatgagcgacatcttccttatgaacgacctccactcagcaaatccatgttgctggaagattccccgcagttacagcaggtgttacccgctaactggtggcaggaaaacaatgttcatctgcattccggtgtaaccatcaaaacgctgggtcgcgacacacgagagttagtgttaaccaacggcgaaagctggcactgggatcagctttttatagcaaccggcgcggcagctcgaccgctgccgttgcttgatgcactgggagaacgctgctttaccctacgccatgccggtgatgccgccagactgcgagaagttctgcagcccgaacggagtgtcgtgattatcggtgccggaactattggtctggaactggctgccagcgccacgcagcgcagatgtaaggtgacagtgattgaactggcggcaaccgtcatgggccgtaatgcaccaccgcccgtgcaacgctatcttttacagcgccaccagcaggctggtgtgcgcattctgctcaataatgccattgaacatgtggtcgatggtgaaaaagtagaactgacgctgcaaagtggggaaacgcttcaggctgatgtggtgatttacggtattggtatcagcgccaacgagcaactggctcgcgaggccaaccttgatactgccaatggcattgtcattgatgaggcttgccgcacctgcgatcccgcgatctttgccggtggcgatgtggcaatcactcgtcttgataatggtgcactacaccgctgcgaaagctgggaaaacgccaataaccaggcgcaaattgccgctgccgcaatgttagggctaccgctaccgctactgccgccgccgtggttctggagcgatcagtacagtgataacttacagtttattggcgatatgcgtggcgatgactggctttgtcgtggcaacccggaaactcagaaggcgatttggtttaatctgcaaaacggcgtgcttatcggtgcggtcacgctgaatcaggggcgtgagattcgcccaattcgcaaatggatccagagcggcaaaacgtttgatgcgaaactgctgatagatgagaacatcgcgcttaaaagtctgtaaccaggataattagcgaatatctcaatgcctggggcgtggcgaggtgcaagagtgtgtattacgtttaaaagtcattatcttgcaaagggattggttatgaacacactacgttattttgattttggagctgcccgccccgttttgttattaattgcccgtatcgccgtggtcttaattttcattatttttggttttcccaaaatgatgggctttgacggtacggtccaatatatggccagcttgggcgcgccaatgccgatgctggcagcgattattgcggtagttatggaagtgcccgccgcgatattaatcgtgcttggctttttcacccgtccgctggcggtgctgtttattttctacacgctgggtacggcggtgattggtcaccattactgggatatgaccggcgatgcggttgggccaaatatgattaatttctggaagaatgtcagtatcgctggcgcgttcttgctattggcaattaccgggccgggggcaatttctctcgatcggcgttaagaaagatgccggatgcggcgtgaacgccttatccggcatttaataaattacagccactctacccgcaagctcatctcactagttgtactttcccctggtgctagcgcaatgagatcacccccttccgggcgatgatgatcatccggcgcatggctcatcggttccagacagaagaaatcaaacgcatatcctttatcaaacgcagggtcggaaacaaagatgaaataacacggtgcaggtggcgtcgtttccatgatgatggcataaccttcctgcggctgctcgatgcgggcctgaccattccatccggcaaaaccattgttcacccactggcgcggcaacggcgcgggctggttaaaatccagttcctgcggtagctgctcgcaaaactcacccgccagccactgctcccgctccagccagtaaccgctcgcctgtgcctgaatccgcgtttgcgggctcaacggaaaataaggatgccagccggtaccaaatggcagcgtctctgccccttgattggtgacagagagcgtcaccgtcagcgtatccgccgttaaatgaaacgcctgacttacccgatagtgatagacaccgctgcgatgttcatacaccagacacaaactatcatcgctgtggctgacacattgccactcgcccagccagccatcgccgtgtagatagtgcgcatcccactcaacattcggttgcagttgatactcacgcccctgccagacaaaacgattgccgctcacccggtttgcaaatggcaccagcggaaaacaactggcatcggttgccacaccgctttttttaccaggacgtaagagcggcgtcgtatcgcgccagaagccttcgattacgccgccctggtcagaaacgtccagctttaggctcccgtgggataaggtatagatggtcatccgctaactccttaatccgggaagttaatcacaactttcccgcatttgccgctcgccatcagcgcataggcatcacctgcctgttccaggctgaagcgatgggtaatggcgttacgcggccacagcttccagtccgtcagatcatgggcgcatttttccatatggaacagactggtcacccaggagccgataatccgccgttgatggtgcatcagatcggcgctgacctcgaattccacttttccggtttcaccaatgtaaaccacccgtccccagtcagcggtggattgcagtgccagcaagcgacctgcggcattaccggaacaatcgagcgcaacatccgcgccaccgtgggtgagttcggcgataatctgcggcagaccttcggtggttgctaaatagccgtgatccatcacccctaactgttttgccatcgccagacgttccggcagcatatcaacgccgatgatccgttttgcaccgcgacctttcgccagcatcatcgccatcatgccgactggccccagaccgaccaccagcacgttatcactgccggaaacttcgccgcgcaaaattccttcatacgctgtaccaacgccgcaactgataaacgcaccatcttcgtagctcagcgcatccggcaggaggatcagatctttttcttccgccagcaagtattcggcatgaccgccgtcacgctgccagccgtaagccgcttttccttcgccagtacaagaaataggaaaaccgcgacggcagttcgggcaaaaaccacagccagaaatgtgatacaccagcacgcggtcgccctctttaaaatggcggcagccttgccccatcgccacaatctgcccgcacggttcatgaccgttgataaagccctggtataacggtttatcgggtgccgccgctgtggcacggtgttgatgatagatatagtggacatcgcttccgcaaatcccggaggatttcattttgatcagtacctggttaatccccggcgtcggcaccgcaacttcccgcagatcgacggtgctatttcctggtaaataagctgccagcatcgttttcataaatccctcattaacaatacgattaattttcatccctgccgcacccgcgccaggggcgttaaggtttagcgtttcgctttactgcttcgctgggtcagcaagatattcgccagcaccgccaccacgatgatgacgccgcgtaccacctgctggaaaaaggagttaataccgagcagcaccagaccgttaccgattagcgtaatcaccagcacaccaagcaatgtaccgaacagggaaccgcgaccgccggaaagtgccgtaccgccgaccacgaccgcggcgatgacgtcaaactccagaccgtttgcggcacctgcgttaccagaaccgaggcgcgccgccaacaaaatgccggtcaccgccgctaataatccgctaagggtaaagataagaatgcgcacccgacgaacgttgatgccgcacaactgcgccgccgtagcattaccgccaacggcaaaaacgctgcgcccgaaggcggttttgcggctgatgaacacaaacagcgcaaacaacacaatcatgatcagcgcggataccggcacaccgagaaattgtccgcccagccagtccagcacctcgttttcatcaatcggcactggcagtgcgttcgtcataaacagccccattccgcgcagggcgctccacagccccagtgtggcaacgaaacttggtacattaaacacgccgcgcagcaccccggccagcgttcccatcagcgcgcctaacagcaacaccagcaggcacgccaccgccagcggaacttcaaattgcagcaaaaatgccaggcacacgctgacaaaagccaccatcggcccaacgctgacatcaatttcaccggagataataatcagcgtcatcgcccaggcggcaatcccaatggtggcggcatcgcgcagcacgttcatctggttattcaaactgataaagccaggcgcgttcagggagaagaccagataaagaatggcaatcaccaccagcaaaccgatctcattaatatggcgactgacaaattgtttgaggctgacgctcttgccctgcggcaatggtaaactgctagcagacatcttcaggttcctcggtaaaattcatcagtgcacagacagaatggcggacatcagctcatccacattgaccggagcgtgaaactcctggctgaacgtgccgtgctgtaataacaggatgcggtcacacaccagcggcaactcctccacttcactggagataaacaccacgctttttccttcggcagccagctcacggacaatacggtaaatctgctgtttggcttcgatatcgacgccgcgcgttggctcgtcgagcaacaaaatctggctggcagcatagacccaacgaccgatcaccactttttgctgattgccaccagaaagcgtgccgatgggtgtttcgctactggcggccttgaccgtcatccgctgcatcacctcttcggtcaggcggcggatggtggaccattgcagcacaccgttggcgctgattttttgccgattggtcagcactgtattttcgtcaacgcccaaccagggaatgatccccgcttctttgcggttttctggcgtatagccaatgccgcgtttcagcatgtcgccgtaatcggggcgcgtgattttctcgccgttgataacaatttcgccctgttcatactcctccagcccaacaatcgccttcagcaattcactgcgccctgcccccagcagaccagcaatgccgagcacttcgccacgacgtagcgtaaaactgatatcctccagcttgggcttatggcgtaacgcacggacttccagcacggcctgatccacaatttcctgaggggctaccggcgcaatatcaacgtgatcgcgcccgagcatcaggctcacaatatgatgcgtggaggtgttttcgagcatcacatcgcccgccacctgaccatcgcgcataacggtggcacaggaggcaatgcggcgaatttcttccatccggtggctgacataaatcaccgccacgcccagtgcgctcatctttttcaccgcgctgatcaccagttcaacttccgcactcgcaaggctactggtaggttcatcaagaatgaccacgcgcggctcgcccttcatcacccgcgcaatttccaccagctgcttttgcgccgggcttagcgtactaacaagttgttcaggactaacgtcaacgcccagcgcctgtaagcaacgttgggcatcctgcgccatttgcaggtaatcaatcatgccgttgcggcggggccactgaccgaggcagaggttttccgccactgtcagcccttccaccagacttaactcctgataaaccgcgcgcacccccagttcagcggcacggcgagtcagcgtagcttcgtcaccttccagtcgcgtctcgccaatccagatatcaccgctatccgggcgttcgctgccggtaagcattcgaatgagagtgcttttgcccgcgccgtttttacctaacagcgcacgaacttcgcctttattgagcgtgaagttaacgttatccagcgcaacgacgccgggataacgcttatttcctgccaccacttttgctaccgggactgcctctgttgccgtgaacatagggacctctgcgaatcagcgattagggcagaccatcaacgtgcgttgccagccactgtttaccgtcttccgttttggtatagagatcgataggcacctgaatcactttttcaccgtcggcttgtttattgataaccttcaatgtttgcgcgaaaacagcattgcccattttcttaccggaaatatccactaccgctttcagcacctgattgttttccagctcctgagcaatttcggttgtcatatcgctaccgaaaacagcaatttttccggcctgattttgattacgtaccgcttttaccgcgccgagtgtcgcaccgccgctttcccccataatggcgttgagatccggcgtggagataattagtttttcaccaacggaaatcgctttatctaaaacagtcccttcctgattagcgacaatttgcgcgccgggaacgcgggattttaaaacttcttcaaatcctttacgtcgctgcacacaaacttcaaaggcttcgcaattgatgacggcaattttcggctggtcaattttattggcaataaaataatcagcggcagcgttacccagttttttaccaaattccagcggatcgccgaccagatacgcgctgacatatttatcgacccccttttgattaatacaggtgttgtagcaaatcaccggaatgcccgcttcactggcgcgacgaacggtacggctactgccattttcagacactgcgcttaaaataatggcatcgacattacgcgccacgagggtatcaacaaaggtactttctttgctaatatcaccctgggcgttagtttctattaactgaacttgtacactggaatcttttgccgcatcctgaacgccctgacgcactccagcgtagtatccctgagtatcaaggtatattgcgccaatggtcatttctttttccgcagccctggcaaatagtgcgctacctaatagcgtagccattaataatagattacgggttgttctcatttttgtaggcatagagcctcctgtagggtttttattaacaacggcttattctaattattttgtgatgagcggcagcgcgtgccgctcaaatattacagttaatagggtttagtgaacgcggttaaaaataaaaggcatcacggtggtgaataatgccgctttcggccaagccggattaatcgccgtcaattcagcgcgagcagactcatattgcgcaacctccccgagtcccgcggacgccagcatcgccaccatcaggcatttttctttatgctgctgttgtaaatcgccatacaggctcaacaagtcaggttggctgacggcaaagaaatccgcttcgatactggttttcgccatctcttgcgcccactgtttcatttcactaaacagttgctgtgcggtttgttgttcgcccagcagtcgcagcgccatcccttgccagaagagataatcaaccggctgatcgttgtaataactgtgaatgttaatagtgcgatcgccggtcgccgccagacgtaaacaacgcgtcgcttcagtttcatcgccctgcgcgttggcgcatatcgcctgccagaaccagatgtcgttatcagtttgccccggtaaacggccttcgcttaaattctccggataatgcagcgcggcatgaagcagttcgcaggcctgctgcggctgtctggcatcaagatgctgccaggcgcgtaataactggttgaggataaactgactggtgaccttcccttccccgccttcccacgggtggaatttgcgcgtggcgagaatgtccgccgctttgtctgcctgacccgtgagatgccacaaattgagcagttctgcggtcatgtcgtcgcgtttcagcgcaatttccagattattttccagacgcgccagtcgtttctccggtgtggctccacttaacttatccagcaaatcccgttcgaaaagcagacgtgcatcctgcggcgcaagctgataagcattatcaagataacgcgcggccagctcataatcgtgttgcttattccacgcatggatcgctaacccgcgccagccgtcggcaaactccgggctcatctctacgcaacgttgccaaaaggcaatggctttgttgtagctacgtttgttgtagtagaagcaagctagtaaatggcgagcaaaccagcactcttcaatactctccagcgccgccacttcttccagcgtattcgggaaacggacaaactgcgggaagacatcaatggcttttgcgaccagttcgccacgttcggctttcggcagcaagctggcttgcaggtaaagcggcagcgtgcgctggcagtccagtgcgttcagcatctctgccgccagggtgggcattccccagttaatcagttgcccggcggtcatcagggcgttaacgtcgcgtccctgacacagaccgcgccactgcgcgagagcactttcgctacgaccatcgaaccagttcagccaccacagagtggcgttcagcggataatcgcgcagcagtttctcgcgctgcacacgcgcgttgtcctgacgaccacttaacaccagcagcagattatgcaggcaaagcacttcctgattggttgggcaggcgcgaagactttgttggcaaaaatccagaccagcgtcgaagttaccattacgcgccgccagtcgtgccaggccataatagccaccggctttgctgttgccgctccagaccgcacgccagaaatcctcttcggcttgttgatattgtccctgacgttcgtaagcactggcgcgaatcaaactcgcctgtccgcactgcggatttttgttcagcgcatgtgcgcgtttcagagcctgagtggcatacgccaccgcttgcgggaaatctgcgcggttatattccagcatcgccagcgccaggttacagcgataatccagcgggtccagcgccacgccgcgcaggtagtaatcgaacggactacggctggcgtgatgatattgctccagatgctgaccgataaaccaggcttcatctgtactggtaatgtcttgtgctgccagtggcgctttggcgacgtccggtaacggcaacgcttgcggctgatgttcctgataactcagtacaatattgccgtcggcatcggagagctcaatggtcagcctttcaggattgataccgtgcaacacgccctggatggcggtcgcaggcatcagtgccacggcatcatcaagtaacgcgttgcatttaccgatttcgcggatcgccaggcggtatccgttcaacggagagatggcatacagcccccactcaatcccccgcttactacgctggagttttatcaccgcatcgcgggaggcattttgcaccatgcccaaagaatgataaggcaggaaatactgctcaaaacgcttctcttcgtaagcatcaagccaggtaaaatcgggctggttatcggcaaaaataccggtcatcagttcgatatacgggccgttattgtcggtcagactcttatcccacgcctggccaaattcactgtgtccccaactccactgttttttacctggcgcaatatggtggttggcaacgtgcagcaaaccgccatcttcatcgtgacaccacgcgccgacaaaatcgtactggcttttttcggccatataactggttggaacaggcacatttttatagcgagaaatgtccactccagcggagtagtccactttgtagtaagtgccggtagcgatggggaaagcggagacggcccgtttgccgtgatcaaacaccgccgttacatccggcgggaagacgctctgatgcccttccccccctttcactgccgggttggcccaccacaagaaatgacgcggcgtggcgttcccgttatagacgcggctggcgatttccagcgccgcccggtcagggcgcagggtgaaacctgtcatcacctgtaaaccatgcatcggctccgtttcgcctacccacaccgtctgtgcaccgtcttcatgggcttcgagggtgaaatcaacgggcataaaggtggtcgggcgatgatgttgcggccagttaaactcaatcccaccggaaatccacggccccagcagccccaccagcgcaggtttaatgacttcattgtgataaacaaaatcgcgctgtttcactttatcccacgcgcgatgcacccgaccgcccagttccggcaggatcatcactttgatgtagtcgttttccagccacaccgcctgccaggatttcagggttttctgctcgctcagcgtatcggtcacgccgtagggataaaccgcgccggagcttccctgataaacgcgattttccaggaacatgggatgtatatcctgcggcccggtttcataggtcgggatctcaacgcgctcttgccacacttttactggagtcatggtgccctcaatattaacaagacatactgaattaaaagatttgtggcagtgtattgaacaatctggcaatgttttcgcggaataatcacgcaattaactaaacaaggtttagtgaagatgagagcctgcattaataatcaacagattcgccaccataacaaatgcgtgattctggaactgctgtaccggcaaaagcgcgccaataaaagtacgctggcccggctggcgcaaattagcattccggcagtcagtaatattttgcaggaactggaaagcgaaaaacgggtggtgaatattgacgatgaaagccagacgcgcgggcatagtagcggtacatggctgattgcgccggaaggtgactggacgctgtgcctgaacgtgacgcccaccagtattgagtgtcaggttgctaatgcttgtttaagtccgaaaggtgaatttgagtatttacagattgatgcaccgacgccgcaggcgctgctgtccgaaatcgaaaaatgctggcatcgccaccgtaaattgtggccggaccataccatcaacctggcgttggcaatccacggtcaggttgatcctgtgaccggcgtgagccaaaccatgccgcaagcgccgtggacaacgccggtggaggtgaaatatctgctggaagagaagctcggcattcgggtgatggtcgataatgactgcgtgatgctggcgctggcggagaaatggcaaaataatagccaggaacgggatttctgcgtgatcaacgttgattacggcattggcagcagcttcgtgattaacgagcaaatttatcgcggcagtttgtatggtagcggacagattggtcacaccatcgttaatccggatggcgtcgtctgcgactgtggacgttatggctgcctggaaactgtcgccagcttaagcgcattaaaaaaacaggcgcgggtatggctaaaaagtcaaccggttagtactcaacttgatcctgaaaaactgactacagcgcagttaatcgctgcctggcaaagtggagaaccgtggatcaccagctgggttgatcgctctgccaatgccattggtttgagtctgtataacttcctcaacatcctcaatattaatcagatttggttgtacggtcgcagttgtgcctttggtgagaactggcttaatactattattcgccagacaggatttaacccgttcgaccgcgacgaaggaccgagcgtgaaagcgacgcaaattggctttgggcaattaagccgcgcacaacaggtgctgggaattggctatttgtatgttgaggcgcagttacgacagatttgatggcgcgataacgtagaaaggcttcccgaaggaagccttgatgatcataaacgaaaaattgcctgatgcgctacgcttatcaggcctacacggagattgcaatatattgaatttgcaaagttttgtaggccggataaggcgttcacgccgcatccggcatgaacaacgagcacattgacagcaaatcaccgtttcgcttatgcgtaaaccgggtaacgtgcgcagatgtcgagaactttacctttgatgcgctcgataacggcttcatcattgatgctgtccagcacgtcacacatccagccagccagttctttcgcttcggcttctttaaagccgcgacgggtaatcgccggagtacctacacgaataccggaggtcacaaacgggctcttcggatcgttcggtacgctgtttttgttgacggtgatgttagcacggcccagagcggcgtctgcttctttaccggtcaggtttttatcaaccagatcaaccaggaacaggtggttatcagtgccgccggaaaccactttgtagccgcgctcgaggaacacttctaccatcgctttagcgtttttagcgacctgctgctggtaagttttgaactcaggctccatcgcttctttcagagcaaccgctttaccggcgattacgtgcatcaacggaccgccctgaccaccagggaaaacggcagagttcagttttttgtacagctcttcgctaccacctttcgccaggatcaggccgccgcgcggacccgccagggttttgtgagtggtggtagtaacaacgtgagcatgaggaaccgggttcgggtagacgccagcagcaaccaggcccgcaacgtgcgccatatcaacgaacaggtaagcaccgatgctgtcagcgatttcacgcattttcgcccagtccaccacgccggaatatgcagagaaaccaccgataatcattttcggcttgtgttctttggcttgtttttccagatcggcgtagtcgatatgaccggtagcatcgataccgtaaggaacgatgttgtacagtttaccggagaagttaaccggagaaccgtgagtcaggtgaccgccatgcgccaggttcatacccagaacggtatcacctggttccagcagcgcggtgtagaccgcaaagttagcctgggagccggagtgcggctggacgttagcgtagtcagcgccgaacagttctttcgcacgatcgatcgccagttgttcaacgatatcaacatactcgcaaccgccgtagtagcgtttgcccggataaccttcagcatatttgttggtcagctgagaaccctgcgcctgcattacgcgcgggctggtgtagttttcggaggcgatcagttcgatgtgctcttcctgacgtactttttcctgctccatagcctgccacagttcggcatcataatcggcaatgttcatttcacgctttaacatccgcatctcctgactcagctaacaataaaatttttggcctttataggcggtcctgttggacaacggcgaacagtataaccgaatcattgtgcgataacaggtcttgacaaaggaatttacgcaaacgattaccttcaggctacgcaaggctttggagaataaagagcttgcaaccggaaacggatttcttttcaggtttgtgatgcaaatttttcacttcatcacattctttctgaaaaacaccaaagaaccatttacattgcagggctattttttataagatgcatttgagatacatcaattaagatgcaaaaaaaggaagaccatatgcttgacgctcaaaccatcgctacagtaaaagccaccatccctttactggtggaaacggggccaaagttaaccgcccatttctacgaccgtatgtttactcataacccagaactcaaagaaatttttaacatgagtaaccagcgtaatggcgatcaacgtgaagccctgtttaacgctattgccgcctacgccagtaatattgaaaacctgcctgcgctgctgccagcggtagaaaaaatcgcgcagaagcacaccagcttccagatcaaaccggaacagtacaacatcgtcggtgaacacctgttggcaacgctggacgaaatgttcagcccggggcaggaagtgctggacgcgtggggtaaagcctatggtgtactggctaatgtatttatcaatcgcgaggcggaaatctataacgaaaacgccagcaaagccggtggttgggaaggtactcgcgatttccgcattgtggctaaaacaccgcgcagcgcgcttatcaccagcttcgaactggagccggtcgacggtggcgcagtggcagaataccgtccggggcaatatctcggcgtctggctgaagccggaaggtttcccacatcaggaaattcgtcagtactctttgactcgcaaaccggatggcaaaggctatcgtattgcggtgaaacgcgaagagggtgggcaggtatccaactggttgcacaatcacgccaatgttggcgatgtcgtgaaactggtcgctccggcaggtgatttctttatggctgtcgcagatgacacaccagtgacgttaatctctgccggtgttggtcaaacgccaatgctggcaatgctcgacacgctggcaaaagcaggccacacagcacaagtgaactggttccatgcggcagaaaatggcgatgttcacgcctttgccgatgaagttaaggaactggggcagagtctgccgcgctttaccgcgcacacctggtatcgtcagccgagcgaagccgatcgcgctaaaggtcagtttgatagcgaaggtctgatggatttgagcaaactggaaggtgcgttcagcgatccgacaatgcagttctatctctgcggcccggttggcttcatgcagtttaccgcgaaacagttagtggatctgggcgtgaagcaggaaaacattcattacgaatgctttggcccgcataaggtgctgtaatttgatgttgccggatggaaacatccggcaacccttgacgcggtttaaattgccgcgtcgtcctcttcaccggtacggatgcgaatgacccgtgccacgtcaaagacgaagattttaccgtcaccgattttgccggtttgcgccgtgcgaataatggtatcgacacaggtatcgacaatgtcgtccggtacgacaatctcaattttcactttcggcagaaaatccaccatatactccgcgccgcggtacagctcggtatggcctttctggcgaccaaagcctttcacttcggtcaccgtcatgccggtaataccgacttcggccagtgcttcgcggacatcgtccagcttgaagggttttataatcgcatcaatctttttcatgctattccttgaaaaggtcgcctgtcttttgatctgctaaacgtaacacataacgccaattcattccttgaaatcgtttgcatccagctcgtgtcgggaaagcagtttataaaattctgtccggttgcgccccgccattctcgccgcgtgggtgacgttgcctttggtgatttgcagcagcttacgcaaatagttgagttcaaactgattacgtgcctcaacaaaggttggcagcgccgtattttcaccctccagcgcctgctccaccagcgcatcactaatcaccggagaactggtcagcgccacgcactgttcaatcacgttgaccaactggcgcacattacccggccagctcgcggtcatcaggcgtttcatcgcatcggtagagaacgcgcggacaaacggtttatgtcgctctgccgcctggcgcaacaggtgatttgccagtagcggaatgtcttctgtgcgctccgccagtgccggaattttcaggctgacaacgttgaggcggtaatagagatcttcgcggaattccccgcgcgccatcgcttttggcagatcacggtgagtggcagaaataatccgcacattgatatcaatatcgcggttactgcccagcgggcgcactttacgctcctgcaacacgcgcagcagtttgacctgtaacggcgcaggcatatcgccaatttcatcgagaaatagcgttccgccttccgccgcctggaataaaccttcgcgattgctgacagcgccagtaaacgcgccacgcgcatgaccaaacagctcgctctccagcaattgctcgggcaatgcgccacagttaatagcaataaatggtttgctgttgcgcgggctggcgttgtggatagcctgggcgaaaatctctttcccggtgccgctctgaccgttaatcaaaacgctgacgtcactttgcgccaccagccgcgcctgttccagcaaacgcagcatcagcgggctgcgggtgacaattgcctcgcgccagcgttcatcggtggctggcgcggattgctccagcgcatcgtcaattgcctgatatagcgcgtctttgtcgacaggcttggtgaggaaactaaaaacgccctgctgtgttgcagcaacggcatcgggaatagaaccatgcgcggtaagaataattaccggcattcccggctgcactttctggatttcagcaaacagctgcataccgtccatttcatccatccgcaggtcgctgatgactaaatctactttttcgcgattcagtacccgtaatccttcagcgccactttccgccgtgaccacactgtagccttcgctggtcaggcgcaggccaagcagtttcagcaatcccggatcgtcatcgaccaataataaatgcgcaggtttatggctcatcaggagtgacctcatgggtggatggcgcgggcttttcactctcgtgcggcgtatccgggctgaaatttccagccggtttgcgggtgctgagctggcgttcaatatcggtcaggttttccagcttgcgggtggtgagttccagttgctgctgtagaacgtgatgttgctggcgcaatgtatccagctcgctgtcgctggactgctggagtttactgtaacgttggcgctcttccgccagttgcagttgcagcgcctgaccatcgcgccagagttgatacagtgggcgaacctgtgccgggatctcggtacttaacgcttcaatacgcgcgaccagctggcggcgctcatacggcgtaattttggcgtcggcgagcaaaatcccttgtttaaaggtattttgccagctgccgtcgtcatattggcgagcttgctgacggctctgcgcaggcattaaacgatcagcacaatccatcgcccgcagccagtaaagcggattggtttcggtacttttaccttgcagcgcccagatgtcgctacattcagtagaaagatagtcagccagttgataaaccggaattttttcttctgctggcgtatcaatggctggcttattgtgattctgcacgcaacccagcaatgccagacatggcagccctgccagccacagccgtcggggcaataatcgttgaaaaatgtgtcgcatattcaccagacttaaagcctatcccagtgggcgtaattgttgcagacagtctggacatggacagcgcggagaaaccggagcgtacatatcgtacgtgaagatttcgagcactgcccggggccgaactgacaaataaaatagcctgataggataggctgttagcattatttcgtgtttttgctgctcggtaattcaatgcggaaacaaacgtcttgcccgctctcgtcgaccagatacagttccccttgcatacggcgaatacaatccctggcaatgcttaatcccagaccgctgcccttcaccgccccttttcgctggtggcttccctgaaaaaagggttcgaagatcatggcgcgttcctcttgcggaatgggcgtgcctgtattgatgacatcaatataaacccgcgcaccatgtaaactgctgcgaaggcaaatgttaccggattcagccccgtagtgcaccgcattggagtaaagattatccagtacgctcatcagcagcattggctccgccaggcaagctgttgctttgagatcgacgtcggtatgcatcattttagcccgtgcgggcaggctatgagcagaaaccactgtctccaccagcggtgctaactcaacattctccagttccaccgcactgtccgcctgtttacggttgtaatcaagcagttgttcgatcagtttttgcaaattgcggctgctgctatcaagaatgctcaccacctctttttgctctggcgtaagcggcccgacaacctggtcagccagtaattcagtgccctcgcgcatactcgccagtggcgtttttaattcatgagataaatgtcttaaaaattgatggcgttgggattccagccaactcaggcgctcacttaaccaaagaatacgttgcccaacgctgcgtaactcgctcggtccactgaagctgacgctattgcccagagaacgcccttcccccagacggttgatcatgcgctcgatatttttcaccggcccgataatcatccgcgtgaaaagcagtaccattaccagactcaccagaaatagcaccaggctttgccaaccaaaatattgcccacgttcggcgatttcacgctgaagctgctgcccacgagagaacaccactgtgcgcgtggcctgtaccatttcggtattggcactggcaaaggcttcaagacgtgcggcggcggcagcatcgggaccgctgttgttacactgaagttgagccagattgtgcaaatcctgacgtaatgcctggtagagtttatcgtccggcagcacgcctgcgtgggcatcgagcatttcgctgtaacgcttgcgctggctttgataaaccttcgccagggttgggtcgtccagcacgcaatactgacggtaactacgctccatctccagcgccgcgttggtcatcgcttcactgcgccgggcatcaataagcgtagtgcggttaaccagcgccgcctgatcgctaagcgcattcaggctttgccaggcttgccatgccagcaccaacaggggcagcagaatcagcaaaaatgccagcattaccagttgtcgtaaactgcggggaaaaacgggccagcgtttcaaggtgttactctcgtcagacgcgaatagcctgatgctaaccgaggggaagttcagatacaacaaagccgggaattacccggctttgttatggaataaggcggtgcctaactcgacgtttcgcccgatggttgatatagctacgctgatatcagaagttggacggcaggcaccttgttgtgcgtcattcgtattttatgtagcacgtcccgaaggggctgacataagtcggtgaatgagccactggttactattatgcagtaactgtgccaataaagaaaatagtttggtaacgtactgattatacgttgctttgaggggtttatgtctcctccgctgtttgaatgtaaatcagccactgtgtcgctaaaaagagacaacttaagataaacttattagataatattaaaatcaatgagttaagtgtcgccagaaagcgacacggcaaaccacccattgtcgtgatttacagacacaaaaaagctcccggagttgggagcttatgatagtggttggtgcttaatgccgcatccgggctgcaaaaccaatgggctgacgacttaccccaactgcttacgcgcattgcggaaaatgcgcatccatgggccatcctcgccccagttttccggatgccaggagttgctgacagtacggaaaacacgttccgggtgcggcatcataatggtgactcgaccactttcagtcgtgactgccgtaataccgttcggactaccgttcgggttagccgggtaggtttcagtgactttgccgaagttatcgacatagcgcagtgccaccagccctttgctttccagtgccgccagatgcgccgcatcacgcacttccacgcgcccttcaccatgagagacagcaatcggcatttggctgcccaccatcccctgcaacagcagagacgggctttgggttacttcaaccaggctgaaacgcgcttcaaagcgatcggaggtattgcgcacaaaacgtggccacaactcactacctgggatcagttcacgcagattagacatcatctggcaaccgttacatacccccagcgccagcgtttgcggacggtggaagaaggttgcaaactcatcgcgtacacggtcattgaacaggatactcttcgcccaaccttcaccggcacccagcacatcaccgtaggagaaaccaccgcacgcgaccagggcgtggaaatcttccaggcccgtgcgtccggtcagcaggtcactcatatgcacgtcgatagcatcaaagcctgcacggtggaaagctgccgccatttcaacatggctgttcacgccctgctcacgcagtacggcaactttcggacgtgcgccagtggcaatatacggtgctgccacatcttcgttgatatcgaagctcagttttacattcaggcccggatcggcgtcgttagatttcgcctgatgctcctgatcggcacactccgggttgtcacgcaggcgctgcatctgccaggtagtttctgcccaccagacacgcaacgtggtgcggctttcgctgaatacagtctgcccgttggcggtaatcacaaaacggtcaccggaaaccgcctgccctacataatggacacaatcagcaagcccatgctgtgccagtacggactcgaccgcttcacggtcagcggcacgaacctgaatcaccgcacccagttcttcgttaaacaacgccgccaggcgatcgtcacccagagtggcgatatccgcgtcaatgccacaatgaccagcaaaggccatttccgccagcgttaccagcaggccgccatcagagcggtcgtgatacgccagcagcttacgctgtgcaaccagcgcctgaatcgcgtcatagaagcctttcagttgcgcgacatcgcgtacatctgccggtttgtcgccaagctgacgataaacctgcgccagcgccgttgcgcccagcgcgttattgcctttgcccaaatcaatcagcagcagtgcgttatcttcggtagaaagctgcggcgtgatggtgtgacgtacatcttccacgcgggcaaatgcagaaatcaccaggctcagcgggctcgtcatttcgcgctcttcgttaccttcctgccagcgggttttcatgctcatggagtctttacccaccgggatcgtcaggcccagcgccggacaaagctcttcgcccacggctttaacggcttcatacaggcccgcatcttcaccagggtggcctgccgccgccatccagttggcggaaagtttgatgcgtttgatatcgccaatttgtgttgcggcgatgttggttaacgcttcaccgaccgccagacgggcagaggcggcgaaatccagcagcgcaaccggcgcacgctcgccaatcgccatcgcttcaccgtagtagctgtcgaggctggcggtagtgaccgcgcagttagcgaccggcacctgccacggccccaccatctgatcgcgcgctaccatgccggttacgctgcggtcgccaatggtcaccaggaaggttttttccgccacagtcggcagatgcagcacacgtttcaccgcgtctgcaatggtgatcccttcacgggccagcgcgtcgcctttcgctttcagcgtttgtacatcgcgggtcatcttcggcgttttaccaagcaggacgtccagcggcagatcgatcggctgattatcaaaatgacgatcgtgcagagaaagatgcagttcttcggtcgcttcaccaatcaccgcgtagggtgcgcgctcacgcttacacagttcgtcaaacagcggtaattgatcggcagcaaccgccagcacgtagcgttcctgggattcgttacaccagatttccagcgggctcatgcccggttcgtcgcttagaatctcgcgcagttcaaatttaccgccgcgcccgccgtcgctcaccagttccggcatggcgttagaaagaccgccagcgccaacgtcgtggataaacaggattgggttggcatcaccaagctgccagcaacggtcgatcacttcctggcagcgacgctccatctccgggttgtcgcgctgtacggaagcaaagtcgaggtcggcatcagactgaccagacgccatagaagacgctgcaccaccgccaagaccgatgttcattgccgggccgccgagaacgaccagcttcgcaccgacgttgatctcgcctttttgtacgtgatcggcgcgaatgttgccgatcccgcccgccagcatgatcggtttgtgataaccgcgcagctcttcgccgttgtggctgttcactttttcttcataagtacggaagtagccgttcagtgccggacgaccaaattcgttgttaaacgccgcgccgcccagcgggccttcggtcatgatgtccagcgcggtgacaatgcgctcaggcttaccgaaatcttcttcccacggctgttcgaagccaggaattcgcaggttggaaacggagaaaccaaccagacccgctttcggctttgcgccgcgcccggtggcaccttcatcgcggatttcaccgccggaaccggtcgccgcgcccggccacggagaaatcgccgtcgggtggttgtgagtttcgactttcatcagaatatgcgccggttcctgatggaaatcgtagcggcccgtttcgtggtcagcaaagtagcggcccacttcagaaccttccattacggcggcgttatctttataagcagagagaacgtgatctggcgtggtttcgaaagtatttttgatcatcttgaacaggcttttcggctgctgttcaccatcgataacccagtcggcgttaaaaattttgtggcggcagtgctcggagttcgcctgggcaaacatatacagttcgatgtcgttcgggttacgaccaagctttgtgaaagcatcctgcagatagtcaatttcatcttccgccagagccaagccaagacgcaggttagcgtcgatcagcgcctgacggccctgccccagcaaatcaacgctggtaaccggagtcggttgatggtgggcaaacaactgctctgcatcatctaaagcaaaaaagaccgtttccatcatgcggtcgtgcagttcagcggtaacctgctgccattgttcattggtcagcgtaccggcttctatatagtaagcaacgccgcgctcaaggcggtttacctgttgtagcccgcagttatgggcaatatcggtcgctttgctagaccagggagagatggtgccaggacgcggggtcaccagcaggagtttgccttgcggggcgtggctggcgagtgccgggccatatttcagcaggcgttcaagttgtgcgtgctcatcatcgtttaacggcgcattgaggtcagcaaaatggacatactcggcgtaaatattgtgaaccgggagcctggcagcctgaaaacgtgccagcagtttgttgattcggaatgcgctcagtgcagggctaccacgcagaatttccatcataagtctctcgtcttctaagctttcggtgtacccaagggggggaaacgggcgtcattataaagaatctgatgcgctgacgaaaccgtttgcgtggaaataaaatcaccatcgtgaattagcaacgcgtgccgccaatggctgtaataagttgccatctggcgcaggtttacgcaaaatgccgctcatttatgagtaaacctttcactattattacgttttttcaagctgggacgcgcacgacacagagaattaactaattgaaaaaattaaagattaattatctgttcatcggcattctggcactgctgctcgcggtcgctctctggccatccattccctggtttggtaaagccgacaaccgtatcgccgccattcaagcgcggggagagttgcgtgtgagcaccattcatactcccctgacttataacgaaatcaacgggaaaccttttggcctggattacgaactggcgaaacagtttgccgattacctcggcgtaaaactgaaagtgaccgtgcggcagaatatcagccagctgtttgacgaccttgataatggtaacgccgacctgctggcggcaggacttgtctataacagtgagcgggtaaaaaattatcagcctggccctacctattattccgtgagtcaacaactggtttataaagtgggtcagtatcgcccacgtacgctgggcaacctgacggcggagcaactcaccgttgcaccgggtcatgtggtggttaacgatctccagaccctgaaagaaacaaaattcccggaattaagctggaaggtagacgacaaaaaaggctctgcggaattaatggaagatgtcatcgaaggaaaactcgattacaccattgctgattctgtcgccatcagcctgtttcagcgcgttcacccggagctcgccgtagcgctcgatatcaccgatgaacaaccggtgacttggtttagcccgttagatggcgataataccctttccgccgccctgctcgacttcttcaacgaaatgaatgaagacggtacgctggcacgcattgaagagaaatacctggggcatggcgatgattttgattacgtcgatacgcgcacatttttacgcgccgtcgatgcggtactgccgcagttaaagcccctgtttgagaaatacgccgaagaaattgactggcgtttgctggccgctattgcttatcaggaaagccactgggatgcacaggccactagtccgacgggtgtgcgcggcatgatgatgttaaccaaaaataccgcgcaaagcctcggcattacggatcgtaccgatgccgaacagagcatcagcggtggcgtgcgttatttgcaggatatgatgagtaaagtgccggaaagtgtgccggagaacgagcggatctggtttgccctcgctgcgtacaatatgggctatgcgcatatgctggatgcccgcgccctgacggcaaaaaccaaagggaatcctgacagttgggctgacgcaaaacagcgtctgcctttacttagccagaaaccctattacagcaagctgacttacggctacgctcgtggacatgaagcctacgcttatgtcgaaaatattcgtaagtatcagattagcctggtgggttatctgcaagagaaagagaagcaggctacagaagcggcgatgcaactggcgcaggattatccggcggtaagccctacggagttgggcaaagagaaatttccttttctcagctttctttcccagagcagtagtaactatttgacccattctccctctctgctgttttccaggaaagggagtgaagagaaacaaaattaatccgtgctggattgcgcttttttctgcgctttaatttcctggcggcgcatgcgaaagaagtcactgagcaacgccgcgcactcatccgccagtattccttccgtaatttccactcggtgattcatacccggatgatgcagcacatccattaaagatcccgcagcgccagttttcgcgtcacgcgcaccaaagaccacgcgaccaatgcgactgtggatcatcgctccggcacacattacacatggttcaagcgtgacatacaacgtggcgtcgatcagacgataattttgcatcaccagaccaccctgccgcagggccatgatttctgcatgtgcggtgggatcatggcgaccaatcgggcggttccagccttcgccgattacccgattgttatgcactaataccgcgccgaccggcacttcccgctcatcccaggcacgtttcgccagcgtcagcgcgtgacgcatccagtattcgtggctaaattcgacttcagacaaaaagaaaactccggttataaaagcgcggcgcattatacacggacgctatgctttactttattccagttgctggagttcaccgcgcggggttactcgccaacgatgctgacagaaataaagcagcggattgtcctgattactgtcgctatagccactgtacagccgcagcggagtgccgattttgcgctccagttgtgcgaccttttcatgtcccagacaacgcatcgtcaatacccaaccaccatagccacgctgaatttggctggcgataagattaacccgcggcagccagggcgtatcgaaataaaccgcttcaaccagcggctgcggagagccggtaatcaaccagatatcagcatcggaacttaacaggtaggtggttaatcgctcctgaaccagcggaaaggcggtaacattgtcgcgaaaccagcgcacgaaatcggcctgcaacgtctgtaaacgtgcttcgctgtgaccaaaagtgcacccccacagaagcagactcatcggccagcgtgccgcacgaccttttatcaataacgcaatggctataatcggtaacaacggcaggacaagtaacgcattcagcggttggcgacgtagtaaatagcgcagaaaactgccgaacatatcctgctgatgcaatgttccatctaagtcaaaaaacaccacacgacgctcgtgagttgccaaaccatattcctctggactgaaacatcctgattaattttcgctactacatagcctaacagatagatcatcacttttccggcaacaatcgaccgcatcatggctaactggaatttttaattcatggcaattagcggcaatggaatataaaattcactcgcgtgtgtctcatattgcctgttgtcgccactatttcatcgcgaggaaagatatgaacggcttacttcgtatccgtcagcgttaccaggggcttgcccagagtgataaaaaactggcggattatctgctgctacaacctgatacggcgcgccatttaagctctcagcaactggccaacgaagccggagtcagtcagtccagcgtcgtgaagttcgcgcaaaaactcggctataaaggttttccggcgcttaagttggcgttgagtgaagcgctggcaagccagccggaaagtccctccgtgcccattcataaccaaatccgcggtgatgatccgttacggctggtcggcgaaaaactgattaaagaaaatactgccgctatgtacgcaacgctaaacgttaatagtgaagagaaactgcatgaatgcgtaacaatgttgcgctctgcgcggcggataattctgaccggtattggcgctagcggtctggtggcgcaaaactttgcctggaagctgatgaagattggcttcaatgctgccgcagtgcgcgatatgcatgcgctactcgcaacagtacaggcgagctcccctgacgatctgttattagccatttcctacaccggtgtacgacgcgagttaaacctggcggcagatgagatgctgcgagtgggcggaaaagtgctggcgattaccggctttactccgaatgccctgcaacagcgtgcttctcattgcctgtataccattgccgaagaacaagcgacaaacagtgctagtatctctgcttgtcacgctcagggaatgttaacggatttgctgttcattgcgctgattcagcaggatctggaactggcaccagaacgtattcgtcatagtgaagcgctggtgaaaaaactggtctgagtaaagaatgcgcgtataatgcccgcccggtttgtgttgttttgagagtttccttatggcgttgttaatcactaaaaaatgcatcaattgtgatatgtgtgaacccgaatgcccgaatgaggcgattagtatgggagatcatatctacgagattaacagcgataagtgtaccgaatgcgtagggcactacgagacaccaacctgccagaaggtgtgcccgatccccaatactattgtgaaagatccggcgcatgtcgagacagaagaacagttgtgggataaatttgtgctgatgcaccacgcggataaaatttaatattctactctggaagtagagtattaattatattactgggaagccttaacgccattatatttatttaattgatgacattagcataatcattcactaagttaatttatatagtatctgcccagacacttatttatagttattaaaggtgcgtccgactggttcaccggacgcaccttaagtacgtttccttgtgttataagaacagaaggatcagctgtaaaacagcaatgatgattttgatgacccgtttaatcaggtatcggcaatcagtcattcgtttttccttaaacaaggaatgcagccattcagattagcccttacatctccccaaaactgaacgtgcgagttattgagggtgcatgctgcactccacaccagagctttgacgacaccactcgtttcaatgggggaattctgtggcatggtgtaaagcacagcaaaatcttcaataacgaagccaattttaatgtacttacgaattggcggtcacgttaatctttccatcaatattgctttcttcgtaaaggctcgagtttttatgctaaagattgcaagttgcttgtaaaagataagtacactgatccataatcgctgttgttgagggtgcatgctgcacaaaattaaagttaaaaagtaaaacccccgttccttaccagttcgggggttttactttttaaagagaacggtattatttttaactttcaataattaccgtggcacaagcatagtgccgctcatctgccagcgttacatgcatatttgcaacgcccagcttttccgccagttttaatgcctcgccccatagccgtagccgtggtttgccgagctcatcattgaatacttcaaattgattaaacgccagaccattgcggatcccggtgccaaacgcttttgctgcggcttctttcacagcaaaacgcttcgccagaaaacgcaccggctggtggtgcgttttccagatagcccattcgttatcgcttaatacgcggcgtgccaggcgatcaccggatcgggcgatcaccgcttcgatgcgagcgatctccacaatatccgtgcctaaacctaatattgccattagccacgcgcttccagcatcagacgcttcatttctgccaccgcatctttcagtccggtcatcactgcacgaccaataatggcatgaccgatattcagttcatgcatctcagggatggcggcaatggctttcacgttgtgataggtcagaccgtgtccggcgttaactttcagaccgaggcttgcggcaaaggtcgcggctttggcgatacgcgccagctcttgcgcctgttcggcgtcagttttggcatcagcatagcaaccggtgtggatctcgataaacggtgcgccaacctctgccgcagctttgatctgctcttcatcggcgtcaataaacagagaaacctgaatcccggcatctgccagacgtttgcaggcatcgcgcattttgtcacgctgccctgcgacatccaggccgccttcggttgttacttcctgacgcttttccggtaccaggcagcaaaaatgtggcttcgtctcaacggcgatcgccagcatctcttcggtcaccgccatctccagattcatgcgggtatccagcgtctgacgcaggatgcgcacgtcgcggtcagtaatgtgacggcgatcttcacgtaaatgcacggtaatgccgtccgctcccgcctgctcggcaataaacgcggcctgcaccggatccgggtaagcggtaccgcgcgcgttgcgcagcgtagcgatatggtcaatgttgacgcctaacagtaattcagccatgacaatcctcatcattcataatgtgttttcaccgttcgcttaggcataaactgccggaacagttccctgctctttaaaggtttaccgccaagatacggcttaagcgccatgcgggtaaagcgtttcgcggcgcgcagtgtgtctgcgtcaggaaattcccgtgcgtttaacgcttttaactgccttccggtgaacgttttattgtcgataacgacgcttgcgataaaccctttttcttcgcgataacgatacgtcatggtgtcatctaccggctcgccgctacccgcacaatgggtaaaattgacgccataacccagatgcccgagcagtgccagttcaaagcggcgcagcgcgggttctggcgtaccagtgacccctgcaagagactgaatgcagtgcaagtaatcgaaaaaaagttcagagaagcgcgtctcgtattccagtacgcgggagagaagttcgttgatgtacagaccgctgtaaagcgtgataccgcttaatggcagcgccaggctgacggcttcagcactgcgcagcgttttgacttcgccacgcccgccaaaacgtagcaagagaggggtgaaaggctgtaatgcacctttcagggtagagcgtttagagcgtgcgcctttggcaaccagacgcacgcgcccgctttcctccgtgaagacgtccagcatcaggctggtttcgctccacgggcgactatgcaggacaaatgcgcgctgccagccttccatcggagttactcttaaagatcgtcaacgtaaccgagactgcgcagtgcgcgttcgtcgtcggcccaaccggatttcacttttacccacagttcaaggtgaacaggcgcttcgaacatttcctgcatgtctttacgcgcttcaatcccgatggttttgatcttggcccctttgttgccaatgaccatcttcttctgcccttcacgctcaacgagaatcaaaccgttgatgtcataaccaccgcgttcgttagagacgaaacgttcgatctccacggtcacggagtacggcagttcagcgccgaggaaacgcatcagtttttcgcggatgatttcagacgccataaaacgctgactgcgatcggtgatgtaatcttccgggaagtgatgagtcgcttcaggtagatgcttacgcacgattgccgcaatagtgtcaacattcagcccggtttcggcagagattggcacgatatcgaggaagttcatctggcttgccaggaactgcaggtgcggcagcagatcggctttctcctgcacgttgtccactttgttcaccgcgaggattaccggcgctttgccttcgcgcagtttgttgagcaccatttcgtcgtccggcgtccagcgggtgccttcaacgacaaaaatcaccagctcaacatcgccaatagagctgctcgccgctttgttcatcaggcggttaatggcgcgtttttcttccatatgcaggcccggtgtatcgacgtagatcgcctgatacgcgccttcagtatggatccccacaatgcggtgacgagttgtctgcgccttgcgggaagtgatggagattttctgccccagcagtttgttcaacaatgtggatttgccaacgttcggacgtccgacgatggcaataaatccgcagtaacttttatcgatgctcattccagctccagttttttcaacgcctgttcggcggcagcctgctcagccttacgacggctactacctgtgccaaccaccggttcactcaggccgctgacctggcagtggatagtaaattcctgatcgtgcgcttcgccacgtacctggactaccagataagtcggcagcggcagatggcgaccctgcaaatattcttgcaagcgcgttttcggatctttttgtttatcgcctgggctaatttcgtccaaacgagtttgataccagttgaggattaatttctcgacggtttgaatatcactgtcgaggaatacgccaccaattaatgcttcgacggtgtcggcgagaatactctcacgacgaaatccaccgcttttaagttcacctggccctaaacgtaagcactcgcctaactcaaattcgcgcgccagttccgccagcgtattgccacggaccagcgtggcgcgcatccggctcatatcgccttcatccacacgagggaaacggtgataaagcgcattggcgataacgtagctcagaatagagtcgcctaaaaattctaaacgctcgttatgtttactgctggcactacgatgagttaatgcctgctgcaacagttcctgatgattaaaagtgtagcccagcttccgttgaagccgattaattacgatggggttcatgcgataccaataaataaatgcgtcaacaattcagcacacgaaacagacctgatatacatggttctgctaactgcttcgctgcagtttcagtttaccggtatatggggaccaacgctgtttcgtgtgccgtggcaacctggaggtgccaaccttaaacttcgggggaatattctatacacaacgacgggggatgtcgttagccacgggagatttatctcataaataattcacgttgtcgccataacggcgacaacgtgaacgaagatggctattaatggatgccgccaatgcgacttaagcgcagaccagtcggccattcgccttcttgcttatcgaagctcatccagatagccgttgcccgaccgaccagattcgcttccggcacaaagccccagtaacggctgtccgcgctgttgtcgcggttgtcgcccatcatgaagtattgtcccggaggaacaatccaggttgccagttgttgccctggctgctggtaatacatccccacctgatcctgcgcaatcggcactgtcagaatgcggtgcgtcacatcacccagtgtctctttacgctcggaaagacgaattccattttctttggtttcgtttttcggcacttcaaagaatccgctggtcgcttccccaccattacggcgactgaaggtctgaacgaaatcgctcggttccacgttactgtaggtgaccggcagcgcgttttcacacgcctggccggaactgcatcccggttgaatcgtcagctctttactgaccggatcgtaagtgactttatcgcccggtaaacccaccgcgcgcttgatgtaatcaagctttggatcttccggatatttaaagaccacgatatcgccgcgtttcggatgaccggtttcgatcagcgttttctggtagataggatctttaatgccataagcaaacttctctaccagaataaaatcaccaattaacagagtcggcatcatgctaccactcgggatctggaacggttcataaataaagctacgcacaatcaatacgatagccagtaccggaaaaacagaagcaccggtttccagccagccaggcttcggcgcaacctttttcaacgttgctttatccagactgtccccggcagccgcctgcgccgctgcctgacgttcccgccgtttaggtgcgaaaaagaatttatccacgcaccataaaatgcccgtcaccagtgtggcaatcaccagaatcagggcaaacatattcgccatgccaactcctaagggttatttgttgtctttgccgacgtgcagaatggcgaggaacgcttcctgcggcagctcgacgttaccgatctgcttcatgcgtttcttaccttctttctgcttctgcagcagctttttcttacggctgatatcgccgccataacatttagccagtacgtttttacgcagctgtttcacggtggatcgcgcaatgatgtgcgtaccaatcgctgcctgaatggcgatatcaaactgctggcgtgggatcagatctttcatcttctccaccaactcgcgaccgcggttttggctattatcacggtgggtgatcaacgccagcgcatcaacacgttcaccgttgattaatacgtctacacgtaccatgtcggacgcctggaagcgcttgaagttgtaatccagagacgcataaccacggctggtagatttcaggcgatcgaagaagtcgagcaccacttccgccatcgggatctcgtacgtcagcgccacctgattaccgtggtaaaccatattggtctgcacgccgcgtttttctacgcacaacgtaataacgttgccgagatatgcctgcggcagcagcatgtgacactctgcaatcggctcgcgcagttcgtagatgttatttaccgcaggcagcttggatgggctgtcgacgtagataacttctctactcgtggtttcaacttcatacactacggtcggcgcagtggtgatcagatccagatcgtattcacgttccagacgttcctggatgatctccatgtgcagcaggccgaggaagccgcagcggaaaccaaagcccagcgcgctggagctttccggctcatagaacagactggcatcgttcaggctgagtttacccagcgcgtcacggaaggcttcatagtcgtcggaacttaccgggaacagaccggcgtatacctgcggtttgactttcttaaagccaggcagcgccttttctgccggattacgcgccagcgttaaggtatcgccgactggagcgccgtggatatctttaatcgcacatacgagccagcctacttcgccacatttcagttcagtgcggtcaacctgtttcggcgtgaagatgcccagacggtcggcgttataggtctgcccggtactcatgactttcactttgtcgcccttacgcagggtgccgtttttaatacggataagactaacaacgcccaggtagttgtcgaaccaactgtcgataattagtgcctgcaacgggccttccggatcgccttccggcggcggaatgtcgcgcaccagacgttcgagaacgtcctgcacaccaacgccggttttcgcactacagcgcaccgcgtcggtggcgtcgatgccgacgatatcttcaatttcttccgccacgcgttcaggatcggctgccggcaggtcaatcttgttcagtaccggcacaacttcgagatccatttccatggcggtgtagcagtttgccagggtttgcgcttctacgccctgcccggcgtcgaccaccagcaatgcaccttcacaggcagccaggctacgggaaacttcataggagaagtctacgtggcccggggtgtcgataaagttaagctgataggtttcgccgtcagacgctttgtagtccagcgtcacgctttgcgctttgatggtaatgccacgctcacgctcaagatccatggaatcgagaacctgcgcctccatttcacggtcagacaggccaccgcagatctggataatacggtcagacagcgtgcttttaccgtggtcaatgtgagctatgatgctaaagttacgtatattcttcataaagtatgattattgtgccttaatgcccggttaaccaggcttttagaagtcgctgttctgagcttaacgtctgtattaatagaaacgccgcattctacactacaacattgaggcgaggaaatgttcataccgtatggattgtggtatctggaaacgtcctcgcatttgttatgcaaaatgcaacaaagccagtgaaatcactggctcgcgtcttcgctagatgtttcaaatcgcacaaggccaggcggcaatgccacgcttaagatgatcggttgccattctgcccgggcagcaaacttacggctgtagccgcgcgcaatcaggaacccgccaataccaccgaggatcgcaccacataatgctgcgacgtcagaagcaaagagtagctgaaataggctagcgataaggaataatcccaccagcgggctcatataaaccagtaatgcggagctaagcaggctgccttcggcgatccccaattccactttttgccccggcactaacggctcatcacagggtacgacaatggtatgcgtggtttgcgggccaagtttatttaacacgcggctaccgcaaccggcgcgactagcgcagctgctgcaactagctttaacatcacaactgaccagcgcctgcccgttttgccaggagacgacggtagcccactctttgatcattgcgctgccccgaacttaatattctcggcaatgcgtttcgccgtttgcggcggcagttcaccgacaatggtgatttcggcgttatcacgtacgcttgtactgacggttctgcgtccggtgcgcaacatctgatcggtgctgcttggcgtagcgcggttaacgtttacgctgaagctgaataatccgtcggaatagagacgactttcgataggcatgttgtccatcgtcggtagcggacgtcgactactggaaacttcgctaaaaccctgtggcaaccaggttggcgtccagctgaatttagctttttcacctacaggaacagaaagcaacggcggcaaatttgccttcgccagcgtctgcatactgctgctgatatcctgattgacgttaaaagcaatcacgcgaaattgttccagcgtttcaccatcgcgatcaaggagatcaacccgcatcggtaatttgctttcggtgtccatccacacgatgtagctgtagcgtgtaccatctcgggcaaccacgcgaatgacttcgcaaagacgatcagcaatacgcgtgcgcccgacggagataaagtcgtagtaaggagaaaggcgtttgaaatcggtatagataaggcttggcagagaatcaacaatgtaatcgccattaagcgtgaacggttcaagtcccggttcaaaatagctgatttcattgccgcgctgtaccacttcccggcgcgggccatccatttgcaacaattgtgcaagaggacggttatcgaggcgtgcatgtcgataacgcagagactcaacaccctgtttattgatgctgatgaaactcagctcgtaattcagactctgactggccaggttcatctgctgtaataacgccccggacgcgggagtggcgctggcgttagcagagaataacaggctacctgtcactaaactcatggcaaaccaaagttgcttcattactggctttgcgttcctaaagtttgaattcctggcacctgtacagcggcttgctgggtttgcgcctgctcaaactgaagctgttcagagtggagtcggcgttgcagttcgtaatcctgcaacattgcattaatgcgacgacgctgctcctgtacctgctgctgttgaccattgtttgcggtcgcttcagaaggtactcccaggcttaccgggctggctttacccatcatcggcagtgtattaaataccggcgtttcgggctgctgggacgtttcagattgtccattatagtgctggacgccaacgataactgcaaggcttacgcatgcggctacgcccatttgggtaagctgtgccgcccacggacgtactttctgccagaatggcattttctgccattgatgcggcgcaggctgggcttccgggatcaatgtcgccggttgacgtactggctcttcttcaatggcggccatcacgcgactagagatatcgaaatggagcacctcgggagtatcaccccgcatactgtcacggattaagtgatagctttcccaggttttctgcatttctgggttatgagccagttcgttaagcagctcactatccagcgtttcgccatccattaaagcggaaagttgttctttctgcatgcctaatacccttatccagtatcccgctatcgtcaacgcctgataagcggttgaactttgttatcaatagcttccctcgctcggaagatacgactacgcaccgtacctaccggacaatccatgatagcggctatctcttcatagctcaggccatccagctcccgcaaggttattgccatgcgtaaatcttccgggagggactcaatagttcggaaaactatctgtctcagttcttcactcaacattaagttctcagggttgctaatttctttcaacgcgccgccactttcgaagttttcagcttcaatggcatccacatcactggaaggtggacgacgcccctgagcaaccaggtaatttttcgctgtatttacagcaatccgatacagccatgtataaaaagcgctatctccccggaagctatccagcgcacgataggctttaataaaagcttcttgtaccacatcgggaacatcaccgctcggcacatagcgggaaaccagactcgccactttatgctgatagcgcactaccagtaagttaaaggctttctgatctcccttctggacccgttcaaccaggacctggtccgttaactgctcgctcatccgaggtaaagtctccccaaaccaaatttccacgcgctatcgaaacgccactccattagctgcaatttgagcaagcaaagggttagagtgtctcgtttttgtaaagttccgtaacgcatctgtttttgtttgtcatgctgtagacggatcattatctatcattataagtctacagaatctgaacatcgcattatctgtgtagaaatgcccatttaactgcctgaagagtaacccaacggcctttttatttcaccacctaatcctccaccagccagtaacttctctttttctcgccgccctgcgtcagcgtgtttagcaactgtaacaaatattaaaatagcaggtgtttatccgcacaacatgatgctatgctgaccaaaccatgtttagtaaattaaacaaagaaaatgaatactctccctgaacatagttgtgacgtgttgattatcggtagcggcgcagccggacttagtctggcgctacgcctggctgaccagcatcaggtcatcgttctaagtaaaggcccggtaacggaaggtagtacattttatgcccagggcggtattgccgccgtgtttgatgaaactgacagcattgacagccatgtggaagacacattgattgccggggctggtatttgcgatcgccatgcagttgaatttgtcgccagcaatgcacgatcctgtgtgcaatggctaatcgaccagggggtgttgtttgatacccacattcaaccgaatggcgaagaaagttaccatctgacccgtgaaggtggacatagtcaccgtcgtattcttcatgccgccgacgccaccggtagagaagtagaaaccacgctggtgagcaaggcgctgaaccatccgaatattcgcgtgctggagcgcagcaacgcggttgatctgattgtttctgacaaaattggcctgccgggcacgcgacgggttgttggcgcgtgggtatggaaccgtaataaagaaacggtggaaacctgccacgcaaaagcggtggtgctggcaaccggcggtgcgagcaaggtttatcagtacaccaccaatccggatatttcttctggcgatggcattgctatggcgtggcgcgcaggctgccgggttgccaatctcgaatttaatcagttccaccctaccgcgctatatcacccacaggcacgcaatttcctgttaacagaagcactgcgcggcgaaggcgcttatctcaagcgcccggatggtacgcgttttatgcccgattttgatgagcgcggcgaactggccccgcgcgatattgtcgcccgcgccattgaccatgaaatgaaacgcctcggcgcagattgtatgttccttgatatcagccataagcccgccgattttattcgccagcatttcccgatgatttatgaaaagctgctcgggctggggattgatctcacacaagaaccggtaccgattgtgcctgctgcacattatacctgcggtggtgtaatggttgatgatcatgggcgtacggacgtcgagggcttgtatgccattggcgaggtgagttataccggcttacacggcgctaaccgcatggccagcaatagtttgctggagtgtctggtctatggctggagcgcggcggaagatatcaccagacgtatgccttatgcccacgacatcagtacgttaccgccgtgggatgaaagccgcgttgagaaccctgacgaacgggtagtaattcagcataactggcacgagctacgtctgtttatgtgggattacgttggcattgtgcgcacaacgaagcgcctggaacgcgccctgcggcggataaccatgctccaacaagaaatagacgaatattacgcccatttccgcgtcagtaataatttgctggagctgcgtaatctggtacaggttgccgagttgattgttcgctgtgcaatgatgcgtaaagagagtcgggggttgcatttcacgctggattatccggaactgctcacccattccggtccgagcatcctttcccccggcaatcattacataaacagataaaaagcctgggtcagcgccgtatacgcttcggaatagttctggtctggcccacgaatgactaagcgatcgctaaagcattctcccgcctgcggggagaatgccagcagcacccgatgcggcagtcgcgcttcgttttccgccacatccgtccgcaaacgtaaatgccagcccatgcttaatgccagctccgtaaaaccattaccaatctgctctggcagcactacgcagaaaaatccctcttcggtaatgcactccgccgcacaggtcagcaagcttgggtgatcaagcgtagtggtatagcgagcctgttcccgttgaggtgtgctgcactctactccctgctgatagtaaggtgggttactgatgattaaatcgaagcgtactgtctgctgtgtaatccactgctgaatatccgccgtatggacgttaatccgctctgcccacggggactggttgatattttcctgcgcctgcgcggcagcttcactttccagttcaactgcatcaatcatcacgctgtcatcggttcgctgcgccagcattaatgccagcaacccgctacccgcgccgatatcaaggcaacgttttaccccagccaccggtgcccatgcgcccaataaaataccatccgttcccactttcatcgcacagcgatcgtgagcaacaaaaaactgtttaaaagtaaatccattacgacgaagcacggatgtagactgactcatgaaaataaaaccttgcaggaaaaacggcgatagcaccgggtgagaacaatacccgagaagcgatatccatacaaacagatgaagattgcagccgtaacgtctataatcagcgccccacacagaggtagaacatgactgtaacgactttttccgaacttgaactcgacgaaagcctgctggaagccctccaggataaaggtttcactcgcccgaccgccattcaggctgccgccattccgcctgcgctcgatggccgtgatgtactcggttctgcgccgacaggcaccggtaaaacggcggcgtatctgctgccagcgttgcagcacctgctcgatttcccgcgtaagaaatccggtccgccgcgtattttgatcctcaccccaactcgcgagctggcgatgcaggtgtccgatcatgcccgcgaactggcgaaacatacgcatctggatatcgccaccatcaccggcggcgtagcctatatgaaccacgcggaagtgttcagcgaaaatcaggacatcgtggtcgccacgaccggacgtctgctgcaatacataaaagaagagaacttcgattgccgcgcggttgaaacgctgatcctcgacgaagcagaccgtatgctggatatgggcttcgctcaggatatcgaacatattgctggcgaaacgcgctggcgtaaacagaccctgctctttagcgcaacgctggaaggcgatgcgattcaggactttgccgagcgtctgctggaagatccggtggaagtttctgccaatccctccacccgtgagcgcaaaaaaattcatcagtggtattaccgcgccgatgatcttgagcataaaaccgcgttgctggtgcatctgttaaaacagccggaagcgacccgcagtattgtgtttgtgcgtaagcgtgagcgtgtgcatgagctggcaaactggctgcgcgaagcgggcatcaacaactgctatctcgaaggtgagatggtacagggcaagcgtaacgaagcgatcaagcgtttgaccgaaggtcgcgtaaacgtactggtcgcaaccgatgttgccgcgcgcggtatcgacattcctgacgtcagccacgtctttaacttcgatatgccgcgcagtggcgatacttatttgcaccgtatcggacgtaccgcgcgcgccggtcgtaaaggcaccgcaattagcctggtggaagcccatgaccatctgctgctgggtaaagtaggccgctatattgaagagccaattaaagctcgcgttattgatgagttacgcccgaaaacgcgtgcgccaagcgaaaagcagaccggcaagccaagcaagaaagtactggctaaacgtgctgagaagaaaaaagctaaagagaaagagaagccgcgggtgaaaaaacgccatcgcgacaccaaaaatattggtaagcgccgtaaaccaagcggaacgggcgtgccaccgcaaacgacagaagagtaatctcaatgccaggtttaagcctggtattaaaagtgctggcaaacgcaaaactgcctgatgcgctacgcttatcaggcctacgtggctcatgcaatatattgaatttgcacgatcttgtaggccggataaggcgttcacgccgcatccggcatgaataaagcgcactttgtcgacaagttaaatgccgggtttaatcccgacattatttttatccagccacaaaactctcttcaacacactgaataaaagtgtgcatcgccgggctaaccgcttttccagcatgatgtgcgcacatggccgtaatggtctggctctgttcgccaaaaggcaattcaattaattctccgcactccaactcttttgccaccgcaaagcgcggtaggtagctgaccccgatattcgccgcgacacaacgcttgatgctttcgatacttataagctcaatggtgttttccaccgtgatccgccgctgacgcagcgtgctctcaaatatctgccggaagacacattgcggttcgttgataataaagctacaggcgttatgtcttcccggctcagtaaaatcgacatctgcaatttgcggactagccaccagcaccagactttgttcacccaactctcgtcgattcagagcatcatcattccctacacgataaaagacgccaacatcggcctcatcattcagtagcgcatcacggatcacgtaacagttcaggctctgcaagcttaaacgcacttttggggcgcgttgccgaaaacgctgcaacacctgcggcattcggtaagagagcaacgtttcgccgctaacaacgcgtagttccccgtccggatcactctcctttttggcagcctcacgaagcgtatccatcactcgggtaagttcataaatgtgcggcagcaacttttttccttcgcgggtaaggcacatccgtcggccaattttctcaaataactggacactaaactcctgctcaagctgctgaatatgaaaagtcaccgtgctttgtgtacagcacaatttttggctagctcgcaaaaaggaaccctcttccaccacggttttaagcgtaataaaacggcgcagatccataaccccaaacctatcgaaaatatcgaatctagaatataaaaacattcatttttttaaatgttccgtgtcgggtactgtctaccaaaacagaggagataacaagtgacaccgacccttttaagtgctttttggacttacaccctgattaccgctatgacgccaggaccgaacaatattctcgcccttagctctgctacgagccatggatttcgtcaaagtacccgcgtgctggcagggatgagtctgggatttttgattgtgatgttactgtgtgcgggcattagttttagtctggcagtgattgacccggcagcggtacaccttttgagttgggcgggggcggcatatattgtctggctggcgtggaaaatcgccaccagcccaacaaaggaagacggacttcaggcaaaaccaatcagcttttgggccagctttgctttgcagtttgtgaacgtcaaaatcattttgtacggtgttacggcactgagcacgtttgttctgccgcaaacacaggcgttaagctgggtagttggcgtcagcgttttgctggcgatgattgggacgtttggcaatgtgtgctgggcgctggcggggcatctgtttcagcgattgtttcgccagtatggtcgccagttaaatatcgtgcttgccctgttgctggtctattgcgcggtacgcattttctattaacgaaaaaaagcggaagaggtcgccctcttccgcttagtaacttgctacttaagccttacaggctttcagtaaaggtacgagcgataacgtcgcgctgctgttccggagtcagagagttaaagcgaactgcataaccggatacacggatggtcagctgcggatatttttccggatgcttaactgcatcttccagagtttcgcgacgcagaacgttaacgttcaggtgttgaccaccttcaacgcgaacttctggtttcacttctactggaacttcacggtattcaatgtcacccagtttgcttactgcaaccacttcatcttctgcataacctgcttttgcaacgatgcaacgcgcttcgcctttttcgctgtccagcagccagaaagagttcagcagatcgtcgttagcggctttagtaatctggatacctgtaatcatgtgatgcctccccggcaaaattatttgatttgttcagcctgtcgcggccaattggtaaaaccattgttgcttgagtgtatatatactcctcaaacacccttgaatctttgatttaaatcaataaaaaccacacatcaagtatggtcgcaaatggattttattgttttacatcaacttatgcgggtgtgaaattttaccaatttacatttttttgcactcgtttaagtctaaaaaatgagcatgattttgttctgtagaaagaagcagttaagctaggcggattgaagattcgcaggagagcgagatggctaacgaattaacctggcatgacgtgctggctgaagagaagcagcaaccctattttcttaatacccttcagaccgtcgccagcgagcggcagtccggcgtcactatctacccaccacaaaaagatgtctttaacgcgttccgctttacagagttgggtgacgttaaagtggtgattctcggccaggatccttatcacggaccgggacaggcgcatggtctggcattttccgttcgtcccggcattgccattcctccgagtttattgaatatgtataaagagctggaaaatactattccgggcttcacccgccctaatcatggttatcttgaaagctgggcgcgtcagggcgttctgctactcaatactgtgttgacggtacgcgcaggtcaggcgcattcccacgccagcctcggctgggaaaccttcaccgataaagtgatcagcctgattaaccagcatcgcgaaggcgtggtgtttttgttgtggggaagccatgcgcaaaagaaaggggcgattatagataagcaacgccatcatgtactgaaagcaccgcatccgagcccgcttagcgcgcatcgtggattctttggctgcaaccattttgtgctggcaaatcagtggctggaacaacgtggcgagacgccgattgactggatgccagtattaccggcagagagtgagtaaatttgcggggaaatgccggatggcagagttgccacccggctgatttatcaggctttattctgacgccaccattcaccaagcaaaacgccggttgcgacagagatattcagcccggcaacgttgcccgtaccgtcaatcttcacgcgcagatcgttcggatcgcgtgcggcatccggtaacccttcatattcctgacccagcaccagtaccattttcgctggcagactagttttgaacagcggtttaccctgctcgctggaagtggtcactacggtgtaacctgcctgacggaaatcatccagcacgttaacaatgttgtcgccagtaatcggctgaacgtgctctgcgccgccttctgcggtacggatagccgccccgctctccagcagtgccgcatcctgcaccacgacacctttcacgccgaagtgcgcgcagctgcgcatcatgccacccaggttatgcgggttagattcgttttccagtgccagaacgcaatcctgcgcgcctgcctggcttacccactgctgcacggttgtaccgttacgctttttgatcaagaagcaaacgccgccgtgatgttccgtgccactcgcttttgtcaattccgcttcatccaccacatggtacgctttgcggtttgctgccatccagcgcaaagcttctttaaaacgcggcgttacactctggataaaccaggcgcgaacaatcgcttccggacggctctggaaaagtgcctgacatgcattttcgccgtagacgcgggtttcttccgcacgctgacgacgcaacacttccggatcaataaaacttttaccactgatgccaccgtgatcggccttttccggcgtctcatcacccggcgcgcgggaaaccgtgcgccacgggctatcttcccacttgcggtcacggggctgactctgtttgtcatcgcgggcggggcgacggccaccgtcagcacgagattttcctggacgcccgccccctttcccggtacgcgggttgtgggtacgtttatcagaatcatcatcactgcggacatacatcactttgaccttgccgcttttacctttcatttcatcgttcatgcttttctccaccagcgctgcgcgaagcgcgcagattacccgaagtccgcgcggttcgccatgatttcgtaccaaagcctgcgactatcatacctattgaataaaacagattgttgtctggaacaatgtccccgataatatgtaacatattagaaacataccggcgtcgttgccgataagtctccttactcatcccgaggttagttatgaataccgtttgtacccattgtcaggccatcaatcgcattcccgacgatcggatcgaagatgcggcaaaatgcggacgctgcggtcacgacttgtttgacggagaggtgattaatgcgaccggtgaaacactcgacaaattgctgaaggatgatctacctgtggtgatcgacttctgggcaccgtggtgcggcccctgccgtaatttcgcaccaatttttgaagatgtcgcgcaagagcgtagcggtaaagtgcgctttgtgaaagtgaataccgaagctgaacgtgaattgagcagtcgctttggaattcgtagtataccgacgatcatgattttcaaaaacggtcaggttgtcgacatgcttaatggcgcagtaccgaaagcgccgttcgatagctggctgaacgaatctctttaatcttaccggggcgcatcttgtgccccgttttctcctctgcgacaatggcgttttttcgacgctctcttatgaccgaaaacgctgttctccagttacgcgccgagcgtattgcgcgcgcaacacgtccttttcttgcccgcggtaatcgcgttcgtcgctgccaacgctgtcttttgccagagaaattatgtctctgtagcacaattaccccagcacaagcaaaaagtcgcttctgtttgctgatgttcgacaccgagccaatgaagcccagtaataccgggcgtctcattgctgatattttgcctgataccgttgcgtttcaatggagccgtaccgaacccagccaggatttgctggagttggtgcaaaacccggactatcagccaatggtggtctttcccgctagctatgctgatgagcaacgggaagtgatcttcacaccacctgccggtaagccaccgctgtttatcatgctcgatggtacctggccggaagctcgcaagatgtttcgtaaaagtccgtatctggataatcttcccgtcatttccgtcgatctttcccggctttctgcctatcgcctgcgtgaagcccaggctgaaggccaatattgtactgccgaggtagccatcgcactgttagatatggccggcgataccggggcggcggcagggttaggcgagcattttacccgctttaaaacacgctatctggcaggaaaaacgcaacatctgggtagcatcacagcagaacagttagaaagcgtttaaaatcattcggtcacttctgcgggagaccggtatgagtcagcgaggactggaagcactactgcgaccaaaaagcatagcggtaattggcgcgagcatgaaacccaatcgcgcaggttacctgatgatgcgtaacctgctggcgggaggctttaacggaccggtactcccggtgacgccagcctggaaagcggtgttgggtgtgttggcctggccggatattgccagcttgccctttacacccgaccttgcggttttatgtaccaatgccagccgtaatcttgctcttctggaagagctcggcgagaaaggctgtaaaacctgcattattctttccgccccggcaagccaacacgaagatctccgcgcctgcgccctgcgccataacatgcgcctgcttggaccaaacagtctgggtttactggctccctggcaaggtctgaatgccagctttagccctgtgccgattaaacgcggcaagctggcgtttattagccaaagcgctgccgtctccaacaccatcctcgactgggcgcaacagcgtaagatgggcttttcctactttattgcgctcggcgacagcctggatatcgacgttgatgaattgcttgactatctggcacgcgacagtaaaaccagcgccatcctgctctatctcgaacagttaagcgacgcgcgacgctttgttagcgcggcccgtagtgccagccgtaataaaccgattctggtgattaaaagcggacgtagcccggcggcacagcgactgctcaacacgacggcaggaatggacccggcatgggatgcggctattcagcgtgccggtttgttgcgggtacaggacacccacgagctgtttagcgcggtggaaacccttagccatatgcgcccgctacgtggcgaccggctgatgattatcagcaacggtgctgcgcctgccgcgctggcgctggatgccttatggagtcgcaatggcaagctggcaacgctaagcgaagaaacctgccagaaactgcgcgatgcactgccagaacatgtggcaatatctaacccgctcgatctacgcgatgacgccagcagtgagcactatattaaaacgctggatattctgctccacagccaggattttgacgcgctgatggttattcatagccccagcgccgctgctcccgcaacagaaagcgcgcaagtattaattgaagcggtaaagcatcatccccgcagcaaatatgtctctttgctgacgaactggtgcggcgagcactccagccaagaggcacgacgtttattcagcgaagccgggctgccgacctaccgtaccccggaaggaaccatcactgcttttatgcatatggtggagtaccggcgtaatcagaagcaactacgcgaaacgccggcgttgcccagcaatctgacttccaataccgcagaagcgcatcttctgttgcaacaggcgattgccgaaggggctacgagcctcgatacccatgaagttcagcccatcctgcaagcgtatggcatgaacacgctccctacctggattgccagcgatagcaccgaagcggtgcatattgccgaacagattggttatccggtggcgctgaaattgcgtagcccggatattccacataaaagcgaagttcagggcgtcatgctttacctgcgtacagccaatgaagtccagcaagcggcgaacgctattttcgatcgcgtaaaaatggcctggccacaggcgcgggtccacggcctgttggtgcaaagtatggctaaccgtgctggcgctcaggagttgcgggttgtggttgagcacgatccggttttcgggccgttgatcatgctgggtgaaggcggtgtggagtggcgtcctgaagatcaagccgtcgtcgcactgccgccgctgaacatgaacctggcccgctatctggttattcaggggatcaaaagtaaaaagattcgtgcgcgcagtgcgctacgcccattggatgttgcaggcttgagccagcttctggtgcaggtttccaacttgattgtcgattgcccggaaattcagcgtctggatattcatcctttgctggcttctggcagtgaatttaccgcgctggatgtcacgctggatatcagcccgtttgaaggcgataacgagagtcggctggcagtgcgcccttatccgcatcagctggaagaatgggtagaattgaaaaacggtgaacgctgcttgttccgcccgattttgccagaagatgagccacaacttcagcaattcattagccgagtcaccaaagaagatctttattaccgctactttagcgagatcaacgaatttacccatgaagatttagccaacatgacacagatcgactacgatcgggaaatggcgtttgtagcggtacgacgtattgatcaaacggaagagatcctcggcgtcacgcgtgcgatttccgatcctgataacatcgatgccgaatttgctgtactggttcgcagcgatctcaaagggttaggcttaggtcgacgcttaatggaaaagttgattacctatacgcgagatcacggactacaacgtctgaatggtattacgatgccaaacaatcgtggcatggtggcgctagcccgcaagctcgggtttaacgttgatatccagctcgaagaggggatcgttgggcttacgctaaatcttgcccagcgcgaggaaagttgagtaaggtactggaaatgttgaccacttaatcgggactggtgttattattgcccgcttatgtcgtctgcattgcacagaggacccttcaatgaacagagaagaaatgcactgtgatgttgagtaaatttaagcgtaataaacatcaacaacaccttgcccaactacccaagatttctcaaagtgttgatgatgtcgatttcttttacgctcccgccgacttccgggagacgctgctggaaaaaatagccagcgcgaagcagcgcatttgcattgtcgccctgtatctcgaacaggatgacggtggcaaaggcattctgaacgcgttgtatgaggctaaaaggcagcgtccggaactggatgtgcgggtgctggtcgactggcatcgtgcacaacgtggacgcattggcgctgcggcatctaacactaacgctgactggtactgccgcatggcgcaggaaaatccgggcgtagatgttccggtttatggcgttccaatcaatactcgtgaagcccttggtgttctgcactttaaaggctttatcatcgacgatagcgtactttatagcggtgccagcctgaacgatgtttacctgcatcagcacgataaatatcgctacgaccgttatcatctgatccgtaaccgtaagatgagtgacattatgtttgaatgggttacacagaatattatgaatggccgcggcgttaatcgtctggatgatgttaatcggccaaaaagcccggaaatcaagaacgatattcgtctgttccgccaggagctgcgtgatgccgcttatcatttccagggcgatgccgacaacgatcagctttctgtaacgccgctagtggggctggggaaaagcagtctgttgaacaagaccattttccatcttatgccttgtgccgagcagaaactaaccatctgtacgccatacttcaacctgccagcaatccttgtgcgcaatattatccagttgctgcgcgaagggaaaaaggtcgaaattattgttggtgataaaaccgcgaatgacttctacattccggaagatgaacctttcaagataattggcgcattgccttatctctatgagatcaatctgcgtcgtttcctgagccgtttgcagtattacgtcaatactgaccagctagtggttcggttatggaaagatgacgacaacacctatcacctgaaagggatgtgggttgatgataagtggatgttgatcaccggtaataacctgaacccgcgcgcctggcgtctggatctggaaaacgccattttgatccacgatccgcaacttgagctggcgccacagcgagagaaagaactggagctgatccgcgagcataccaccatcgttaagcactatcgcgatctgcaaagtattgccgattatccggtgaaggttcgtaaactcatccgccgtttgcgccgtatccgcatcgaccgattaattagccgcatcctgtaatcacaaccccgtcctgtacggggtttgttttttggaggccacgttttgcgtattctttttgtctgttcgctattgttactttctggatgcagccatatggctaacgatagctggagcgggcaggataaagctcaacactttatcgccagcgcgatgctttccgccgccggaaatgaatatagtcagcatcaggggatgagccgggatcgcagtgccatgtttggattgatgttctctgtcagtttgggggcgagtaaagagctttgggatagccgccccgaagggagcggctggagctggaaggatttggcctgggatgtcgccggtgcaagcaccggctataccgtctggcaactgacccgtcattaaagacgcatccccttccctttgcgatgtagcatcaaagaaaccagaaacgccaccacggccatcaaggtcacataccagaagaaggctgtttccattcctatacttttcaggctcaacgctacgtactccgcgctaccaccaaatatagcattagcgaccgcataactcagaccaacgcctaatgcgcgaacctgtgccgggaacatctcagccttcagtattccactgatacttgtataaaaactcactatcagcagggcacacatcaccagaccaaaagcggcataagggctggaaacgttttgcaatgcactgagaataggaacggtaaaaatggctgccaggctaccgaaacataacatactggtacggcgaccaatcttatcgctcagcgcgccaatgagtggttgaataagcatgaatacaaacaatgcggcagtcataatgccactcgccacgttggcatgcattcccgcagtatttaccagatacttctgcatataagtagtgaaggtatagaaacaaagggagcccgcagcggtaaaaccgagaaccatgatgaatgcacggcgattgcgccataatcctttcagagatccagcttcttttaaagcgcgcgtttcttgttggctagtttcatctaactgacgacgtaaccacaacgccacaacagctaacacagctcctaacgcgaaaggaatacgccatccccactctctgagtgcagcgtcttccatggtgtgttgtaaaaccacgacaaccagtagggctagcagttgtccgccgatcaacgtcacatactgaaaacttgcgtaaaaacctttgcgcccttcaacggcaacttcactcatataggtggcgctggtgccatattctccgccaacagataatccctgaaataaacgagcgagaagcaataatgccggagcccacgtacctatagtttcataacctgggaggcaggcgataaccaggcttccgaaacacatcatacacacgcttaacagcatgctttttttgcgaccatgtttatcggctatgcggccaaatagccaaccgcctattgggcgcatcaggaatcccgcagcaaaaacacctgctgtttgtagtagttgagtcgtcgtgttcccggaagggaagaagatgtgggcaaagtagagactacagaagctgtagacatagaaatcgaaccactcgaccagattaccactagaggcccccacaatcgcccaaatgcggcgacgagtatcactacttgtcagtttgctgtctgccgttacagtactttcagccatgccattatgtctcctgccgtaatccgatgcttttgtcggtcgcttttgtttattttttttgtaaaggaaatattatacatttgttgcatatcattatgcaaccttaaccatgaatttagttagcaggaaaatggttattgaggagcttaaggataaatttctggtaaggaggacacgtatggaagtgggcaagttggggaagccgtatccgttgctgaatctggcatatgtgggagtataagacgcgcagcgtcgcatcaggcatttttttctgcgccaatgcaaaaaggccatccgtcaggatggcctttcgcataatttgatgcctggcagttccctactctcgcatggggagaccccacactaccatcggcgctacggcgtttcacttctgagttcggcatggggtcaggtgggaccaccgcgctacggccgccaggcaaattctgttttatcagaccgcttctgcgttctgatttaatctgtatcaggctgaaaatcttctctcatccgccaaaacagcttcggcgttgtaaggttaagcctcacggttcattagtaccggttagctcaacgcatcgctgcgcttacacacccggcctatcaacgtcgtcgtcttcaacgttccttcaggacccttaaagggtcagggagaactcatctcggggcaagtttcgtgcttagatgctttcagcacttatctcttccgcatttagctaccgggcagtgccattggcatgacaacccgaacaccagtgatgcgtccactccggtcctctcgtactaggagcagcccccctcagttctccagcgcccacggcagatagggaccgaactgtctcacgacgttctaaacccagctcgcgtaccactttaaatggcgaacagccatacccttgggacctacttcagccccaggatgtgatgagccgacatcgaggtgccaaacaccgccgtcgatatgaactcttgggcggtatcagcctgttatccccggagtaccttttatccgttgagcgatggcccttccattcagaaccaccggatcactatgacctgctttcgcacctgctcgcgccgtcacgctcgcagtcaagctggcttatgccattgcactaacctcctgatgtccgaccaggattagccaaccttcgtgctcctccgttactctttaggaggagaccgccccagtcaaactacccaccagacactgtccgcaacccggattacgggtcaacgttagaacatcaaacattaaagggtggtatttcaaggtcggctccatgcagactggcgtccacacttcaaagcctcccacctatcctacacatcaaggctcaatgttcagtgtcaagctatagtaaaggttcacggggtctttccgtcttgccgcgggtacactgcatcttcacagcgagttcaatttcactgagtctcgggtggagacagcctggccatcattacgccattcgtgcaggtcggaacttacccgacaaggaatttcgctaccttaggaccgttatagttacggccgccgtttaccggggcttcgatcaagagcttcgcttgcgctaaccccatcaattaaccttccggcaccgggcaggcgtcacaccgtatacgtccactttcgtgtttgcacagtgctgtgtttttaataaacagttgcagccagctggtatcttcgactgatttcagctccatccgcgagggacctcacctacatatcagcgtgccttctcccgaagttacggcaccattttgcctagttccttcacccgagttctctcaagcgccttggtattctctacctgaccacctgtgtcggtttggggtacgatttgatgttacctgatgcttagaggcttttcctggaagcagggcatttgttgcttcagcaccgtagtgcctcgtcatcacgcctcagccttgattttccggatttgcctggaaaaccagcctacacgcttaaaccgggacaaccgtcgcccggccaacatagccttctccgtccccccttcgcagtaacaccaagtacaggaatattaacctgtttcccatcgactacgcctttcggcctcgccttaggggtcgactcaccctgccccgattaacgttggacaggaacccttggtcttccggcgagcgggcttttcacccgctttatcgttacttatgtcagcattcgcacttctgatacctccagcatgcctcacagcacaccttcgcaggcttacagaacgctcccctacccaacaacgcataagcgtcgctgccgcagcttcggtgcatggtttagccccgttacatcttccgcgcaggccgactcgaccagtgagctattacgctttctttaaatgatggctgcttctaagccaacatcctggctgtctgggccttcccacatcgtttcccacttaaccatgactttgggaccttagctggcggtctgggttgtttccctcttcacgacggacgttagcacccgccgtgtgtctcccgtgataacattctccggtattcgcagtttgcatcgggttggtaagtcgggatgacccccttgccgaaacagtgctctacccccggagatgaattcacgaggcgctacctaaatagctttcggggagaaccagctatctcccggtttgattggcctttcacccccagccacaagtcatccgctaatttttcaacattagtcggttcggtcctccagttagtgttacccaaccttcaacctgcccatggctagatcaccgggtttcgggtctataccctgcaacttaacgcccagttaagactcggtttcccttcggctcccctattcggttaaccttgctacagaatataagtcgctgacccattatacaaaaggtacgcagtcacacgcctaagcgtgctcccactgcttgtacgtacacggtttcaggttctttttcactcccctcgccggggttcttttcgcctttccctcacggtactggttcactatcggtcagtcaggagtatttagccttggaggatggtccccccatattcagacaggataccacgtgtcccgccctactcatcgagctcacagcatgtgcatttttgtgtacggggctgtcaccctgtatcgcgcgcctttccagacgcttccactaacacacacactgattcaggctctgggctgctccccgttcgctcgccgctactgggggaatctcggttgatttcttttcctcggggtacttagatgtttcagttcccccggttcgcctcattaacctatggattcagttaatgatagtgtgtcgaaacacactgggtttccccattcggaaatcgccggttataacggttcatatcaccttaccgacgcttatcgcagattagcacgtccttcatcgcctctgactgccagggcatccaccgtgtacgcttagtcgcttaacctcacaacccgaagatgtttcacttcagagttgcgaaaatttgagagactcacgaacaactttcattgttcagtgtttcaattttcagcttgatccagatttttaaagagcaaatatatcaaacaagacttaacagtctgttttgagatattgaggtcggcgactttcactcacaaaccagcaagtggcgtcccctaggggattcgaacccctgttaccgccgtgaaagggcggtgtcctgggcctctagacgaaggggacacgaaaattgcttatcacgcgttgcgtgatattttcgtgtagggtgagctttcattaatagaaagcgaacggccttattctcttcagcctcactcccaacgcgtaaacgccttgctattcacttttcatcagacaatctgtgtgagcactgcaaagtacgcttctttaaggtaaggaggtgatccaaccgcaggttcccctacggttaccttgttacgacttcaccccagtcatgaatcacaaagtggtaagcgccctcccgaaggttaagctacctacttcttttgcaacccactcccatggtgtgacgggcggtgtgtacaaggcccgggaacgtattcaccgtggcattctgatccacgattactagcgattccgacttcatggagtcgagttgcagactccaatccggactacgacgcactttatgaggtccgcttgctctcgcgaggtcgcttctctttgtatgcgccattgtagcacgtgtgtagccctggtcgtaagggccatgatgacttgacgtcatccccaccttcctccagtttatcactggcagtctcctttgagttcccggccggaccgctggcaacaaaggataagggttgcgctcgttgcgggacttaacccaacatttcacaacacgagctgacgacagccatgcagcacctgtctcacggttcccgaaggcacattctcatctctgaaaacttccgtggatgtcaagaccaggtaaggttcttcgcgttgcatcgaattaaaccacatgctccaccgcttgtgcgggcccccgtcaattcatttgagttttaaccttgcggccgtactccccaggcggtcgacttaacgcgttagctccggaagccacgcctcaagggcacaacctccaagtcgacatcgtttacggcgtggactaccagggtatctaatcctgtttgctccccacgctttcgcacctgagcgtcagtcttcgtccagggggccgccttcgccaccggtattcctccagatctctacgcatttcaccgctacacctggaattctacccccctctacgagactcaagcttgccagtatcagatgcagttcccaggttgagcccggggatttcacatctgacttaacaaaccgcctgcgtgcgctttacgcccagtaattccgattaacgcttgcaccctccgtattaccgcggctgctggcacggagttagccggtgcttcttctgcgggtaacgtcaatgagcaaaggtattaactttactcccttcctccccgctgaaagtactttacaacccgaaggccttcttcatacacgcggcatggctgcatcaggcttgcgcccattgtgcaatattccccactgctgcctcccgtaggagtctggaccgtgtctcagttccagtgtggctggtcatcctctcagaccagctagggatcgtcgccttggtgagccgttaccccaccaacaagctaatcccatctgggcacatccgatggcaagaggcccgaaggtccccctctttggtcttgcgacattatgcggtattagctaccgtttccagtagttatccccctccatcaggcagcttcccagacattactcacccgtccgccactcgtcagcgaagcagcaagctgcttcctgttaccgttcgacttgcatgtgttaggcctgccgccagcgttcaatctgagccatgatcaaactcttcaatttaaaagtttgatgctcaaagaattaaacttcgtaatgaattacgtgttcactcttgagacttggtattcatttttcgtcttgcgacgttaagaatccgtatcttcgagtgcccacacagattgtctgataaattgttaaagagcagtgccgcttcgctttttctcagcggcgcggggtgtgcataatacgccttcccgctacagagtcaagcatttctttgcttttctctgttgagattctcaggagaaccccgccgacccggcggcgtgtttgccgttgttccgtgtcagtggtggcgcattatagggagttattccggcctgacaagcgaaaaatataaaaactttatcgttcgctcacttttcaggcaaaacatcttaaatatagtcttttccgtctaacttatagacaaaaacgagccccgaagggctcgttttatcatttactggacggcgacaatccggtcttcattaacttccaggcgaatcactttacccggaaccaattcaccagacagtatttgctgtgccagcgggttttcgatctgctgctgaattgcacgtttcagaggacgtgcaccatagaccggatcgtaaccgttctcgctcagcagtttcagcgcctcgtcagaaatgtggatttcataaccacgttcttccagacgtttgtacagacgtttcaactgaatctgcgcaatgctggcaatgtgctgttcacccagcggatggaagaccaccacttcatcgatacggttaatgaattccggacggaagttatggcttaccacaccgagcaccagctctttcatgtgcgcataatccagttcaccgaagcgttcctgaatcagatcggaaccgaggttagaggtcataatgacgaccgtattacggaagtcgaccgttctcccttgcccgtcagtcagacgcccatcatccagtacctgcaacagaatgttgaagacatccggatgcgctttttccacttcatccagcaggatgacggaatacggacgacgacgcaccgcttcggtcaggtagccaccttcttcataaccgacatatcccggaggcgcaccaaccaaacgagacacgctgtgtttctccataaactcggacatatcgatacggaccatcgcctcgtcgctatcaaacataaagttcgccagcgccttacaaagctctgttttccccacaccagttgggccgaggaacaggaaactaccaatcgggcgatttggatccgccagccccgcacggctacgacgaatagcgttagataccgcatcaaccgcttcgttctgaccaattacgcgatggtgcagttcttgctccatacgcagcagtttttcgcgctcgctttccatcatgcgagaaaccggaatccccgtccaacgcgccagcacttcagcaatttcggcgtcggtcactttattacgcaacagacgcatagttttgccttcgagctgcgttgcggcttccagttgcttttccagttccgggattttgccgtattgcagttcagacatccgcgccaggtcccccacacggcgagcctgttcaatagcgattttcgcctgttccagttccgctttaatggtctgcgtaccagaaaggcttgccttctctgctttccactcttcttctaactcggagtactgacgttctttgtcgctcagttcttcgttgagcatatccagacgttttttactggcttcatcagactctttcattaacgcctgttgttccagtttgagctggatgatacgacgatcgagtcggtcgagttcttctggtttactgtcaatctgcatacgaatgctggatgctgcttcatcgatcaggtcgatggctttatccggcagctgacggtcagcaatgtagcgatgagacaacgtcgccgctgcaacaattgccgggtcagtaatttgcacatggtggtgcaattcgtaacgttctttcaggccacgcagaatcgcaatggtatcttcaacagaaggctcggcaacaaacactttctggaaacgacgttccagcgcagcatctttttcaatgtactggcgatattcgtcaagcgtcgtggcacctacgcagtgcaattcaccacgcgccagcgccggtttcagcatgtttccggcgtccattgcgccatcggctttacccgcgccgaccatggtatgtaattcgtcgataaataggatgacgttgccttcctgtttggcaagatcgttaagcacgccttttaaacgttcttcaaactcaccgcgatatttcgccccagccaccagcgcgcccatatccagcgccagtacccggcggcctttcaacccttccggcacttcgccgttgataatacgctgcgccagaccttcaacgatggcagttttaccgacgccgggttcaccaatcagtaccgggttatttttagtacgacgttgcagcacctgaatggtacggcgaatttcttcatcacgaccaatcaccggatcgagtttgccctgttcggctcgttcggtaaggtcgatggtatattttttcaaagcctgacgttggtcttcagcaccttgatcgttcacgctttcacctccacgcatttgttcaatcgcttgagtaatgttggcggtggtcgcccctgctgctttcaggatgtcggccagcgtgccgcgagactcaagtgccgccagaacgaacagttcactgctgataaagttatcaccacgtttttgcgccagcttgtcgcaaagattaagaacgcgcaccagatcctgacttggctggacatcaccaccagtaccttcaacctgcggtaaacgatttaatgcctgattgatatctgtgcgcaactggccagcatttatgccagcggatgttaataaaggactaacgctacccccttcctgattcagcagggcgctcattaaatgaagtggttcgataaattggttgtcgtgcccgagtgcaagactttgggcatcggcaagagcaagctggaatttattagtaagacgatccagacgcataactcctcccataacggatcaaagttgctactggagattaaatgaggtcatccctcaattattcaaggttattgaccagattaatgtgaaaagaaaatcacgcgtaccggatcgtcttgattctttaggttatatcagccaaatgaaacttgccatacgaccggtggtcttgtcgcgacgataagagaagaaagtctcattttccgtatatgtacaacggtcgccgccgaaaatttgctcaacacccacgttcgccagacgctgccgggcaagctgataaatatccgccagatacttatcaccatgctgaatgaaagctgcacttgctttagcgtctactgccataaacgcctcgcgaacctccccccccacttcgaacgcgcgtggaccaattgccggccctaaccaggcgagaatattttccggattatcagcaaaacaggaaaccgtctcttccagcacgcctgcgcacagtccacgccagccagcatgagcggcggcgacttccgttcccgctcgattgcaaaacagcacagggaggcagtcggcagtcatcactgcgcaaaccgtgccgggcgtattgctataagaggcatccgcccgtttactggcataaggttcgccagtgagcttaagcacatctttgccgtgtacctgctcaagccagaccggtttagaaggcaaattgcccgcagcaaaaagtcgcttgcgattctcctcaacgtgatccgggttatcgccacaatgggcaccgaggttgagactgtcatacgggggcaagctcacgccgccgatacgagtggagctacaggccgcaacaccttttggctgcggccactgcgggacaatcagcttactcataaccagtccacttcatccttatgttcttcgaaatcggcgcgcatcacctcaatcagctccaccatatcttgtggaataggcgcatgccattccatttcgatgccggagatcgggtgataaagacgcagcatggttgcatgtagcgcctggcggtcaaacttacgcagcgtggagataaatgcttcgctagcaccttttggcggacgcggacggccaccataaaccggatcgcccaccagcggatgagtgatatgggccatatgcacgcggatctggtgcgtacgtccagtttccagacgcaaccgcagacgcgtgtgcacacggaagtgttccatgatgcgatagtgagtcaccgctggtttgcccatcggatgcaccgccatatgggtacgtttggtcgggtggcgactgattggctcgtccaccgtgccacctgcggtcatatgaccaatcgccaccgcttcatactcacgagtaatttcacgccgttgcaaagattcgactaaacgcgtctgagccggaacggtttttgccacaaccatcaggccagtggtgtctttatccagacgatggacgatgcccgcacgcggtacatcggcaatgggtggatagtaatgaagcaacgcattcagtaccgtgccatccgggttacccgcgccaggatgtaccaccaggtcgcgcggtttattaatgataataatgtcttcatcttcatagacgatatccagcgggatatcctgcggttcaaaacgcgcttcttcttcaatctcagcgttgatggcaacctgctcgccacccaatactttttctttcggcttatcacaaactttgccgttaaccagcactcgctggtcgaggatccattcttttattcggctacgactataatccgggaacatttcggccaaagcctgatctaagcgttgaccgagttggttttcggacaccgttgcagtgagctgtactcgttgtgccatatatactgcttcttcgtttatcgttggggttttacggctttgccgtttaatatagtgtgctattgtagctggtcttaaccgggagcaggaacagagaatctcccgtattacattttgaggaaagtcaaaacgtcatgacgcgcatgaaatatctggtggcagccgccacactaagcctgtttttggcgggttgcagcgggagtaaggaagaagtacctgataatccgccaaatgaaatttacgcgactgcacaacaaaagctgcaggacggtaactggagacaggcaataacgcaactggaagcgttagataatcgctatccgtttggtccgtatagccagcaggtgcagctggatctcatctacgcctactataaaaacgccgatttgccgttagcacaggctgccatcgatcgttttattcgccttaacccgacccatccgaatatcgattatgtcatgtacatgcgtggcctgaccaatatggcgctggatgacagtgcgctgcaagggttctttggcgtcgatcgtagcgatcgcgatcctcaacatgcacgagctgcgtttagtgacttttccaaactggtgcgcggctatccgaacagtcagtacaccaccgatgccaccaaacgtctggtattcctgaaagatcgtctggcgaaatatgaatactccgtggccgagtactatacagaacgtggcgcatgggttgccgtcgttaaccgcgtagaaggcatgttgcgcgactacccggatacccaggctacgcgtgatgcgctgccgctgatggaaaatgcataccgtcagatgcagatgaatgcgcaagctgaaaaagtagcgaaaatcatcgccgcaaacagcagcaatacataacagaaacctgaaacacaaaacggcagcccttgagctgccgtttttttattctgtcagttgtgaaactgaagcgatttagtcgctatcgatctcatcaaatatggctcgctttgagatattcctcaagtaaaaaaacatctcttcctgcgatttctcacaaaaaagattcgttgacaaaaagtgacaaaattatgagattttcatcacacattttgacatcaggaacggtatgctgaattcaccaagacgggaagacaagaggtaaaatttatgacaatgaacattaccagcaaacaaatggaaattactccggccatccgccaacatgtcgcagaccgtctcgccaaactggaaaaatggcaaacacatctgattaatccacatatcattctgtccaaagagccacaagggtttgttgctgacgccacaatcaatacacctaacggcgttctggttgccagtggtaaacatgaagatatgtacaccgcaattaacgaattgatcaacaagctggaacggcagctcaataaactgcagcacaaaggcgaagcacgtcgtgccgcaacaagcgtgaaagacgccaacttcgtcgaagaagttgaagaagagtaatcctttatattgagtgtatcgccaacgcgccttcgggcgcgttttttgttgacagcgtgaaaacagtacgggtactgtactaaagtcacttaaggaaacaaacatgaaacacataccgtttttcttcgcattcttttttaccttcccctgaatgggaggcgtttcgtcgtgtgaaacagaatgcgaagacgaacaataaggcctcccaaatcggggggccttttttattgataacaaaaaggcaacactatgacaagcgaaaacccgttactggcgctgcgagagaaaatcagcgcgctggatgaaaaattattagcgttactggcagaacggcgcgaactggccgtcgaggtgggaaaagccaaactgctcagccatcgcccggtacgtgatattgatcgtgaacgcgatttgctggaaagattaattacgctcggtaaagcgcaccatctggacgcccattacattactcgcctgttccagctcatcattgaagattccgtattaactcagcaggctttgctccaacaacatctcaataaaattaatccgcacagtgcacgcatcgcttttctcggccccaaaggttcttattcccatcttgcggcgcgccagtatgctgcccgtcactttgagcaattcattgaaagtggctgcgccaaatttgccgatatttttaatcaggtggaaaccggccaggccgactatgccgtcgtaccgattgaaaataccagctccggtgccataaacgacgtttacgatctgctgcaacataccagcttgagcattgttggcgagatgacgttaactatcgaccattgtttgttggtctccggcactactgatttatccaccatcaatacggtctacagccatccgcagccattccagcaatgcagcaaattccttaatcgttatccgcactggaagattgaatataccgaaagtacgtctgcggcaatggaaaaggttgcacaggcaaaaagtccgcatgttgctgcgttgggaagcgaagctggcggcactttgtacggtttgcaggtactggagcgtattgaagcaaatcagcgacaaaacttcacccgatttgtggtgttggcgcgtaaagccattaacgtgtctgatcaggttccggcgaaaaccacgttgttaatggcgaccgggcaacaagccggtgcgctggttgaagcgttgctggtactgcgcaaccacaatctgattatgacccgtctggaaagtcgcccgattcacggtaatccatgggaagagatgttctatctggatattcaggccaatcttgaaagtgcggaaatgcaaaaagcattgaaagagttaggggaaatcacccgtagtatgaaggtattgggctgttacccaagtgagaacgtagtgcctgttgatccaacctgatgaaaaggtgccggatgatgtgaatcatccggcactggattattactggcgattgtcattcgcctgacgcaataacacgcggctttcactctgaaaacgctgtgcgtaatcgccgaaccagtgctccaccttgcggaaactgtcaataaacgcctgcttatcgccctgctccagcaactcaatcgcctcgccgaaacgcttatagtaacgtttgattaacgccagattacgctcactgctcataatgatgtcggcataaagctgcggatcctgagcaaacagtcgcccgaccatcgccagctcaaggcggtaaatcgggctagagagcgccagaagttgctcaagctgaacattttcttctgccaggtgcagcccgtaagcaaaagtagcaaagtggcgcagtgcctgaataaacgccatattctgatcgtgctcgacggcgctaatacgatgcagccgagcgccccagacctgaatttgctccagaaaccattggtatgcttccggtttacgtccatcacaccagaccacaacttgctttgccaggctaccgctgtccggaccgaacatcgggtgtagccccagcaccggaccatcatgcgccaccagcatggcctgtaatggcccatttttcacacttgccagatcgaccagaatacaatctttcggtaaaggcggtaatttgccaataacttgctcagtaacgtggattggcacactaacaatcaccattccggcatcggcaacaatatcagccgctcgatcccagtcatgttgctccagaatccgcacctgataaccgctgagggtcagcatcttctcgaacaggcgtcccatctgaccgccaccgccgacgataaccaccggacgcagactcggacaaagtgttttaaatcctttgtcgttttcactggagtaagattcacgcatcacccgacgcaaaacatcctcaatcagatctggcggtacacccagagcttccgcctctgcacgacggctggccaacatagatgcctcgcgctccggaacataaataggcagtccaaagcggcttttcacctcgcccacttcagcaaccagttccagacgcttcgctaataaattcagcagcgctttatcgacttcatcaatttgatcgcgtaatgcggtcaattcagcaaccataataaacctcttaagccacgcgagccgtcagctgcccgttcagatcctgatgaatttcacgcagcaaggcatcggtcatttcccagctaatgcaggcatcggttacggatacaccgtatttcatttcactgcgcggttgctcggaagactgattgccctcgtggatattactttcgatcatcagaccaataatactgcgattgccatctttgatttgagcaaccacggattctgccaccgcaggctgacggcgataatctttattggaattaccgtggctgcaatctaccatcagagacgggcgcagtcccgcctgttccatctctttttcacattgcgcaacatccgcagggctatagttcggcgctttaccaccgcgcaggatcacatggccgtccggattcccctgagtttgtagcaacgcaacctgccctgcctggttaatgccaacaaaacggtgcggctgggcggcggcgcgcatagcgttaattgctgttgccagactgccgtcggtgccgtttttaaaaccaaccggcatggaaagcccggaggccatttcacggtgagtttggctttccgttgtacgagcaccaattgcactccagctaaacagatcgcccaggtattgcgggctattcggatctaacgcttccgtcgccagtggcagtcccatattcaccagctcaagcagcaatttacgcgcgatctgcagcccggcttctacatcaaaagagccatccatatggggatcgttaattaaccctttccagccgacagtggtacggggtttttcaaaatagacgcgcattaccagatagaggctatcgctgacctctgcggcaagggctttaaatcgacgagcatattccagagcagtttccggatcatgaatggaacaaggaccacatactaccagcagacgaggatcgcgcccggcgataatatcactaatgcttttacggctgtcagcaatctgggcttcttgttgcaggctcaatggaaaagcggccttcagttgttccggagtcattaaaacctgttcgtcggtaatatgtacgttattcagcgcgtctttttgcatgatggcgatcctgtttatgctcgtttgcgatagttgatcctcagcgaggatgacgtaacgataacacataaagtaaagttttcaatccatatttcgtacatttttatttacacaggcaatttagtcgcgctttcaacccttacctctgtatagataaatttacactccctttgaaaacaatccgctatgctttgaaaaaggagaaagaaatgatgaaaaagtttatcgcccccttgttggctttactggttagcggatgtcagattgatccttatactcacgcgccaaccttgaccagcaccgactggtatgatgtcggtatggaagatgcgataagcggcagcgccataaaagatgacgatgcatttagcgatagtcaggcggatcgcggtctataccttaaaggatatgccgaaggacaaaagaaaacttgccagaccgattttacttatgcccgaggactttccggtaaaagctttcctgccagctgcaacaatgttgaaaatgccagccaactgcatgaagtaggcaaaaaggggctgatgaaaatgccagcacaatacgattaaattaattaaaaccccacaaataaattaaacataagattttactcattgtgttttatttctcacattgatgacggtcgcatgaaaaaatgatattttaatgagcattctgaaaaaatatcgatgcatttcgagcgaagatggtggggatccctgaatgcgtttttctcaccgactgttcttacttctgattctcctgctgacgggagcaccaatactcgctcaggagccttctgacgttgcgaaaaacgtgcgtatgatggtttccggtattgtcagttacacccgctggcctgcgctaagtgggccaccaaagttatgtatctttagttctagtcgttttagtaccgccctacaagagaatgccgcgacatctttgccttatctgcctgtcatcattcacactcaacaagaggcgatgattagtggctgcaatggtttttattttggcaacgagagtccgacattccagatggaattaaccgaacaatatccgagtaaggcgttattattaattgccgaacaaaataccgagtgcattattggtagcgccttttgtctgatcatccacaataatgacgtcagatttgccgtaaacctggatgccttaagccgtagcggtgtaaaggtcaacccggatgtcttaatgctcgcacggaagaaaaatgatggataacgataattctcttaataagcgccccacgtttaaaagagcattacgcaacatcagtatgaccagcatatttatcactatgatgctgatctggttgctgctttccgtgaccagcgtgctgaccctgaaacagtacgcgcaaaaaaacctggcactgacagcagcaacaatgacttacagtctggaagcagctgtcgtttttgccgatggccctgcagcaactgaaacactggcagcgctgggccagcaagggcaatttagtactgcagaagtacgtgataagcagcaaaatattctggcatcctggcattacacccgtaaggatccaggcgatactttcagtaatttcataagccactggctcttccctgcccccatcattcagccgattcgtcacaatggtgaaaccattggcgaagtacgcttaaccgctcgcgacagtagtatcagccattttatctggtttagcctcgccgtactgaccggttgtattctgctggcaagtggcatcgcaattaccctcacccgccatttgcacaatggcctggtagaagcgctgaaaaatatcaccgatgtcgtacatgatgtgcgttccaaccgcaatttttcccgacgagttagcgaagaacgtatcgctgagtttcaccgcttcgctctcgacttcaacagtctgctggatgaaatggaagagtggcagcttcgtttacaggctaaaaatgcgcagcttctacgtaccgcgctacatgacccattaaccgggctggctaaccgcgcagcgtttcgtagcggcatcaacacgttgatgaacaattccgatgcccgaaaaacgagcgcgttactatttcttgatggcgataatttcaaatacatcaatgatacctggggtcatgcgacgggcgatagagtcttgattgaaatcgcaaaacggttagctgaatttggcgggctgcgacataaagcataccgcctgggcggcgatgaattcgctatggtgctctatgatgtacagagcgaatctgaagtgcagcagatatgtagtgcactgacacaaatctttaatctcccgtttgatcttcataatggccatcagaccaccatgacattaagcattggttacgcgatgaccattgagcacgcctctgcggaaaaattacaagagcttgccgatcacaatatgtatcaggccaaacaccagcgtgccgaaaagctggtgagataacaaggatatatcgatatgataaagcacctggtagcacccctggttttcaccagtctaatactgactggctgccagtcccctcagggaaagtttactcctgagcaagtcgccgctatgcaatcttatggatttactgaatccgccggcgactggagcctgggcttaagtgatgccattctgttcgcaaaaaatgactacaaattgctcccggaaagccagcaacagatccaaaccatggcagctaaattggccagcacagggctaacacatgcccgtatggatggacacaccgataactatggtgaagacagttacaacgaaggcttaagtttgaaacgggcgaatgtcgtggccgatgcatgggctatgggtggacaaattccacgcagcaatctcaccacacagggtttaggaaaaaaatatcccatagccagtaacaagaccgcccagggccgcgccgagaaccgccgcgtcgcagtggtgattactaccccttaaaacaccagcaaacagataaaaaagggccagccaattggccagcccttcttaacaggatgtcgcttaagcgaaatcttagttaagacgctctttgatacgagcagccttaccagtacgctcacgcaggtagtacagtttagctttacgaacagcaccacgacgtttgacagaaatgctgtcaactaccggagagtgagtctggaagacacgctcaacgccttcgccgttggaaattttacgaacagtgaatgcagagtgcagaccgcggttacgaatagcgataaccacgccctcgaatgcctgcagacgttttttggaaccttcaacaacccatactttcacttccacggtatcacccggacggaaggaaggtacgtcctgcttcatctgctcttgttcaagttgcttaataatgttgctcataatttaatctcttatcctgggtaaactgatatctcgggggcttacgccatcccatcatgtttatgttgctgttgtgcgtgttccgttttgaactccgccagcaaccttgcttgctcttcagtcagagccaggttttccagaagttcaggtcttctaagccaggtacggcccaggctctgtttcaaacgccagcgacgtatctcggcatggttgccgctcagtaacactggcggaacttccatcccttctaacacctcaggccgcgtatagtgcgggcaatccagcaatccttcagcaaaggaatcttccgttgcgctggcttcatgtcccagtactcccggaataaaccgggaaacggagtcaatcagcgtcattgctggtaactcaccaccactgagaacgtaatcgccgatactccattcttcgtcaatttcggtttggatcacgcgctcatctataccttcgtagcgaccgcacaccagaatcaatttttgattcgttgccagttcgctgacgcccgcttgatcaagcttgcgtccctgtggactcagataaatcacctttgcgccttcacccgccgcggcttttgctgcatgaatggcgtcccgcaagggttgcaccatcattaacatccccggtccgccgccgtaaggacgatcgtccacggtacggtgccggtcatgcgtgaagtcgcgaggactccagctctggatgctcagcaggccatttttaactgcccggccagttaccccgtaatcggtaattgcgcggaacatttcaggaaacaggctaattatgccaatccacatagcgccgtcttttaccgtttatccggtggtttaaaaaccaggatcccaatctacttcgatactacgagtagtgagatcgactttcttgataacctgcccatcgaggaacggtacgagacgttccttgataccaaacgcatctttcaggtttgccttaatgacgagaacgtcattagatccggtttccatcatatcgacgactttaccgagatcgtagccttcagtggttactacctggcagcccatcaggtctttccagtagtagtccccctcttcaagctgaggcagctggctactatccacgacaatttcacaattcgtcagcaggttcgccgcatcacgatcgtcaacgcctttcagcttgatgatcatgtcctgattgtggtgcttccagctttccagctggacttgctgccactgacccgccttctggataaaccagggctgatagtcaaaaatgctttcggcgtcttcggtggaagaaaacactctgagccacccacgaataccgtaagagctacccatttttcccaaaacgatgggatcaacaggtgcttgcgcggtgagttgtttgctcatcatgaccaccgtgacagattaagctgctttgtttacttctttgatcagcgcagcaacgcgatcagaaatagttgcgccctggccaacccagtgagcgatgcgatccagatccaggcgagtgccttcttctttttcgctagcgattgggttgaagaaaccaacgcgctcgatgaagcgaccgttgcgtgcattacggctgtcagcgacaacaacctggtagaacggacgctttttagcgccgtgacgtgctaaacgaatagttaccataacatcctcttgtgtgaataaaacaaccggaccccatcgaggaacggagtccggtgtcatattaaaagcccgaaaattttactcatttttgcgggaattgcaatcaacagttgctaactctgctgtaaaaggccgtcggcggtgcagccagtttggtgccggagtgcgcgcagtcaccggagcgtacacgcagtacgtgaggatgacgagcacatcccggtgccaaaatggcaaacaagccaggccgattagcgaccagggaagcctgggggcatcatacccttcatgcttctcatcatcttcgccattccgcccttcttcattttcttcatcatgcgctgcatgtcgtcgaactgtttcagaagacggttaacgtcctgcacctgcataccgcaaccggcagcaatacggcgtttacggctacctttgatgatttctggcttagcgcgctctttcatcgtcatgctgttgatgatggcttccatacgcaccagcactttatcgtccatctgactcttgacgttatccgggatctgccccatgcccggcagcttgcccatcagactagccatgccgcccatatttttcatctggcgcagctgctcaagaaagtcgttgagatcgaagccgtcaccttttttcagcttgctggctaatttctctgcctgcgcgcggtcaactttgctttcgatatcttcgatcaggctcagtacgtcgcccatgccgagaatacggctcgcgatgcggtccggatggaacggctccagcgcctcagttttctcgccaacaccgaggaacttgatcggtttgccagtgatgtgacgaatagagagcgccgcaccgccgcgggcatcgccgtccactttggtcaacactacgccggtaagcggtaacgcttcattgaatgcttttgccgtattggccgcatcctgaccggtcatggcgtcaaccacaaacagggtttcaaccgggttaatgctcgcatggacttgtttgatctcgtccatcatcgcttcgtcaacgtgcagacgaccagcggtatccaccagcagcacgtcgtagaatttcagtttggcttctttcagcgccgcgttaacgatatctaccggcttctgaccaacatcagaagggaagaaatcaacgcccacctgctctgccagcgtctcaagctgtttgattgccgccgggcgataaacgtcggcagaaaccaccagcactttcttcttgtgcttctcgcgcaggaacttaccgagtttaccaacgctggttgttttaccggcaccttgcaggcccgccatcagtacgaccgcaggcggttgcgcagccaggttcagggtctggttctcttcgcccatcgccgcaaccagttcgttacggactattttgacgaactcctgccccggcgtcaggctcttattaacttcatgaccaaccgctttctcttttacgcgattgataaactcacgcactaccggcagagctacgtccgcctccagcagcgccatgcgcacttcgcgcagcgtatcttttacgttgtcttcagtgaggcgtccacggccactgatattgcgcagcgtgcggctcaaacgatcggttaaattatcaaacattgtctctcgcctggggtggaaacggttggccgcaatcgcgacacatcatcagtattttgccgcagtataacatgaaggcgtctttgttgttatgcaacggttggagcagcgtagtcctgacgctatactgcttctctttcttattgctcaaactgtcgacatcactatgcccgtttttgctctgctcgcgcttgtcgcctactccgtcagtcttgcgctgattgttcccggtctgctgcaaaaaaacggcggctggcggcgcatggctattatttctgcggtcattgcgctggtctgccacgcaatcgctctggaagcccgcatcctgcccgacggtgatagcggacaaaacctcagcctgctgaacgttggtagtttggtcagtttgatgatctgtacggtaatgaccattgtggcttctcgcaatcgtggctggctgctgctacccattgtctatgcctttgcgcttatcaacctggcgctggcaaccttcatgcccaatgaatacatcacccatctggaagctacgcctgggatgctggtgcacattggcttaagcctcttttcctatgccacgctaattatcgccgccctgtacgcgctgcaactggcgtggattgattaccaactgaagaacaagaagctggcgtttaaccaggaaatgccgccattgatgagtatcgagcgtaaaatgttccacatcacgcagattggcgtggtgctgctaacgctcacgctttgcactggcctgttctacatgcacaacttatttagcatggaaaatatcgacaaggctgtgctctctatcgtggcgtggtttgtctatattgtgctgctgtggggacattatcatgaaggatggcgtggacgccgcgtcgtctggtttaacgttgcgggcgcggtaattctgacactggcctacttcggcagccgaattgtccagcagttaatcagctaaacccagaaaaggagtttcccctggaacacatttctactactacgttgatcattattctgatcatcatggtggtcatttcagcctatttttccgggtccgaaaccggaatgatgaccctcaaccgctatcgtctgcgacatatggcgaaacagggtaatcgcagcgccaaacgcgtcgaaaaattgctgcgtaagccagaccgcctgataagcctggtgttaatcggcaataacctggtcaatattcttgcctccgcgctcggcactattgttgggatgcgtttgtacggcgatgcgggcgtggcaattgcgactggtgtgctgacttttgtcgtactggtatttgctgaggtattgccgaaaaccattgccgcgctgtacccggaaaaagtcgcttatccgagtagttttctgctggctccgctgcaaattttgatgatgccgctggtctggttgctgaatgctatcacccgtatgctgatgcgcatgatgggtatcaaaaccgatatcgtggttagcggctctttgagcaaagaagagttgcgcactatcgtgcacgaaagtcgcagtcaaatttcccgtcgcaatcaggatatgctgctgagcgtgctcgatctggaaaaaatgaccgttgatgacatcatggtgccgcgcagtgaaattatcggtattgatatcaacgatgactggaaaagcattctgcgccaactctcccacagtcctcacgggcgcatcgtgctctaccgtgatagcctggacgacgccatcagtatgctgcgagtacgtgaagcctggcggttgatgagcgagaaaaaagagttcaccaaagaaaccatgctgcgcgccgcggacgagatctattttgtgccggaaggtacgccgctcagcacgcagttggtaaagtttcagcgcaacaaaaagaaagtcggcctggtcgtcaacgagtatggagacattcaggggctggtgacggttgaagatattctggaagagattgtcggcgatttcactacgagcatgagcccaacacttgccgaagaggtcacgccgcaaaacgacggtagcgtgattatcgatggcaccgccaacgtgcgggaaatcaacaaagcctttaactggcatctaccggaagatgatgcccgcacggttaatggcgtcattcttgaggcactggaagagatccctgtcgcaggcacccgcgtgcgtattggcgagtacgatatcgatattctcgacgtacaggacaatatgattaagcaggtaaaagtttttcctgtgaaaccgctgcgcgagagtgtggcggagtaacgaaaacggcccggcattcgcatgcagggccgtgaattattacgaaagcagaaattaagcttttgctttcgctacagtaaccatcgccgcacgaatcgtacgaccattcagcgtataacccttctgcataatgcccagtacgttacctggcgcaacgtcatcagattccaccattgcgatggcctgatgcacattcgggtccagtgggacgttagtttcggcgatcacttcaacgccaaacttacgcacaacatccagcatgctcttcagcgtcagctcaatgccttcaaccatcgcagacatatccgggttagctttatcagccacttccagcgcacgatccaggctatcaatcaccggcagcaattcgttgatgaatttctccagcgcgaatttgtgggctttttcaatatccagttcagtacgacgacgcaggttttccatttcggcttttacacgcaaaatgccgtcacgttcacgggtctgggcttcagccagctgagcttcgagattcgcaactttttcatcgcgcggatccacctgctcagcagaagcttctggctcaactgcctcaatctcttcgtgctgatccatgataatttcttccggggcttgcccctcaggcgttttctgttctttactactcatgaatttctccgcgtttttttcgcattcatctcgctaacttcgcttattatggggatcagtttcagggtttcaagggaagcactcacattgtcatcaatcttcgcaacaaggacctcggaaaaatgaataatcatttcaagtgtattggcattgtgggacacccacggcaccccactgcactgacaacacatgaaatgctctaccgctggctgtgcacaaaaggttacgaggtcatcgttgagcaacaaatcgctcacgaactgcaactgaagaatgtgaaaactggcacgctcgcggagattgggcaactagctgatctcgcggtagtcgttggtggcgacggtaatatgctgggcgcggcacgcacactcgcccgttacgatattaaagttattggaatcaaccgtggcaacctgggtttcctgactgaccttgaccccgataacgcccagcaacagttagccgatgtgctggaaggccactacatcagcgagaaacgttttttgctggaagcgcaagtctgtcagcaagattgccagaaacgcatcagcaccgcgataaatgaagtggtgcttcatccaggcaaagtggcgcatatgattgagttcgaagtgtatatcgacgagatctttgcgttttctcagcgatctgatggactaattattagcacgccaacaggctccaccgcctattccctctctgcaggcggtcctattctgaccccctctctggatgcgattaccctggtgcccatgttcccgcatacgttgagtgcacgaccactggtcataaacagcagcagcacgatccgtctgcgttttagccatcgccgtaacgacctggaaatcagttgcgacagccagatagcactgccgattcaggaaggtgaagatgtcctgattcgtcgctgtgattaccatctgaatctgattcatccgaaagattacagttatttcaacacattaagcaccaagctcggctggagtaaaaaattattctaattttacgccagcctctttactgtatataaaaccagtttatactgtacacaataacagtaatggtttttcatacaggaaaacgactatgttggcacaactgaccatcagcaactttgctatcgttcgtgagcttgagattgattttcatagcggcatgaccgtaataactggcgagaccggcgcgggtaaatctattgcaatagatgccctcggtctttgtctcggtggtcgcgctgaagccgacatggtgcgtaccggcgctgctcgcgctgacctgtgcgcccgtttttctctgaaagatacgccagcggctctgcgctggctggaagaaaaccagcttgaagacgggcatgaatgtttgcttcgtcgcgtgatcagcagcgatggtcgctcccgtggtttcatcaacggtacagctgttcctctgagtcaactgcgcgaactgggtcagttgctgattcagatccatggtcagcacgctcatcaattactcaccaaacctgagcaccaaaaattcctgcttgatggctatgccaatgaaacctctctactgcaggaaatgaccgcacgttatcagttgtggcatcaaagctgccgtgacctcgcgcatcatcaacagttaagtcaggaacgcgccgcccgtgcggaactgctgcaataccaattaaaagaacttaacgaatttaatccgcagcccggagagtttgaacaaatcgacgaagagtacaaacgtctggcgaacagcggtcaattgctgaccaccagccagaatgcattggcattaatggccgacggtgaagacgcaaacctgcaaagtcagctttacacggctaaacaactggtgagcgaattgattggcatggacagcaaactgtccggcgtacttgatatgctggaagaagctaccatccagattgctgaagccagcgatgaactgcgccactactgcgatcgtctggatctcgatcccaaccgactatttgaacttgaacagcgcatcagtaaacagattagcctggcacgtaaacatcacgtcagccctgaggcattgccacagtattaccagagcctactggaagaacagcagcaactggacgatcaggccgacagtcaagaaacgcttgcgctggcggtaacgaaacatcatcagcaggcactggaaatcgcgcgcgcattacaccaacaacgccagcaatatgcagaagaacttgcacagctgatcaccgacagtatgcatgcgctcagtatgccgcatgggcagtttacgatcgatgttaaatttgacgagcatcacctgggcgctgacggtgccgatcgtattgagtttcgggtaaccaccaacccaggtcagccaatgcagcctattgccaaagtcgcatccggtggtgaattgtcccgcatcgcactggcaatccaggtcatcacggcgcgtaaaatggaaaccccggcactgatttttgatgaagtggatgtagggattagcggtccaacagcggcagttgtcggcaaactgctgcgtcaactcggcgaaagtactcaggtgatgtgtgttacccacctgccacaagtcgcgggatgtggtcatcaacactattttgtcagcaaagaaaccgatggtgcgatgacagaaacgcatatgcaatccctgaataaaaaagcgcggttacaagagctggcgcgcctgcttggtggcagtgaagtcacacgtaatacactggcgaatgcgaaagaactgcttgcagcgtaaacttttttcctgcttcacggtcagagtaaacagcaaaacgccgtaagaccggaaagcaaaaggttttaaagtgatgaaaggtctattatcatcggcatattacagatgagccacgtactgctcgggcccgaaaaggaatcaaatcactatgcgctgtaaaacgctgactgctgcagcagcagtactattgatgttgaccgcaggctgttccactctggagcgagtggtttaccgtcctgacatcaaccaggggaactatctgaccgctaacgacgtatccaaaatacgtgttggcatgacgcaacaacaagttgcgtacgcattgggtacaccgctgatgtccgatccatttggtacgaatacctggttctatgtcttccgccagcaaccaggtcatgaaggtgtaactcagcaaacgctgacgctgacctttaacagtagcggtgtgttgaccaatattgataacaaacctgcgctgagtggtaactaataataaagttgctctcaaagacgttaaaaaaggtgctcaatgagcaccttttttctgtctgttatttattcgcacttttttctgctcgttgcctgcgaagctctttcggatcggcaatgagagggcgataaatctccacccgatcgccatcatgcacactatcgcttagttttgccggacggctgtaaatgccgactttgtttttagttaaatcgatatcggtacgcaattccagcaagccactggcgcgaatagcttcttcaaccgtcgcgccctcctgcagcgtcactcgctgcaggtactgcttctcaggtagcgcataagccacctcaacggcaattttacctggcactgtaaacctctttcgcacgaaccgtaaaagcctggaccatattagccgccagctctttaaacacgcgaccaaaggcgagttcaatcaacttattggtaaactcaaagtcgagatgaaactcgatacgacacgcctcctggctcagcggcgtaaacttccatccaccaatcaatttcttgaacggcccatccaccagattcataagaatactttggttactggtcaactggttgcgggtagtaaacgttttgctgatcccagccttagagacatctaccgccgcagtcatctgcccaggagtggactccagaatccgacttccggtacaacccggcaaaaactgaggataagactgaacgtcattcactaactgatacatttgctccgcgctgtagggtaccagtgcggtccggctaatctgaggcataacaatttccatcaacaaaaatccaacaaataatatcatttatcctgctgtaaaaaaaacgctatcccggcgctgggtaacatcgggttcatgctaagatagagccttgtcccccgcaggattgatatggggtgttttcgatttcagattaccgatgattcacgacgcttatgacgaagaaaaaagcacataaacctggtagtgcgaccatcgcgcttaacaagcgcgcccgtcacgaatactttatcgaagaagagttcgaagcgggacttgccctgcaaggctgggaagttaaatccctgcgcgcaggaaaagccaatatcagcgacagctacgtccttctgcgtgacggagaggcatttctgtttggcgctaacatcacgccaatggccgtggcctccacgcatgtggtgtgcgatcctacccgtacccgcaagttacttctcaaccagcgcgaactggacagtttgtacggtcgcgtcaatcgagaaggctataccgtagtggcgctctccctgtactggaaaaatgcctggtgcaaagtgaaaatcggcgtcgccaaaggtaagaaacagcacgataaacgtagtgatatcaaagagcgcgaatggcaggtggataaagcacgtatcatgaaaaacgcccaccgttaaacctgcactccaattattgaccagttcctcaccgcgcctccctctccggcggcgcgaatgaacatcttattggctatcacatccgacacaaatgttgccatcccattgcttaatcgaataaaaatcaggctacatgggtgctaaatctttaacgataacgccattgaggctggtcatggcgctcataaatctggtatacttacctttacacattggggctgattctggattcgacgggatttgcgaaacccaaggtgcatgccgaggggcggttggcctcgtaaaaagccgcaaaaaatagtcgcaaacgacgaaaactacgctttagcagcttaataacctgcttagagccctctctccctagcctccgctcttaggacggggatcaagagaggtcaaacccaaaagagatcgcgtggaagccctgcctggggttgaagcgttaaaacttaatcaggctagtttgttagtggcgtgtccgtccgcagctggcaagcgaatgtaaagactgactaagcatgtagtaccgaggatgtaggaatttcggacgcgggttcaactcccgccagctccaccaaaattctccatcggtgattaccagagtcatccgatgaagtcctaagagcccgcacggcgcaagccctgcgggcttttttgtgccctcaatttgtcccgcgaagtccgaagagaactaattaaatccgaaccttttaggcccattgataggcccaacgaaaagctctattgtttacgttgggctaaacgcagggagactccccacctttgaaaacaggatgtagcgatgaaacttaacgacagtaacttattccgccagcaggcgttgattaacggggaatggctggacgccaacaatggtgaagccatcgacgtcaccaatccggcgaacggcgacaagctgggtagcgtgccgaaaatgggcgcggatgaaacccgcgccgctatcgacgccgccaaccgcgccctgcccgcctggcgcgcgctcaccgccaaagaacgcgccaccattctgcgcaactggttcaatttgatgatggagcatcaggacgatttagcgcgcctgatgaccctcgaacagggtaaaccactggccgaagcgaaaggcgaaatcagctacgccgcctcctttattgagtggtttgccgaagaaggcaaacgcatttatggcgacaccattcctggtcatcaggccgataaacgcctgattgttatcaagcagccgattggcgtcaccgcggctatcacgccgtggaacttcccggcggcgatgattacccgcaaagccggtccggcgctggcagcaggctgcaccatggtgctgaagcccgccagtcagacgccgttctctgcgctggcgctggcggagctggcgatccgcgcgggcgttccggctggggtatttaacgtggtcaccggtagcgcgggcgcggtcggtaacgaactgaccagtaacccgctggtgcgcaaactgagctttaccggtagcaccgaaattggccgccagttaatggaacagtgcgcgaaagacatcaagaaagtgagcctggagctgggcggtaacgcgccgtttatcgtctttgacgatgccgacctcgacaaagccgtggaaggcgcgctggccagcaaattccgcaacgccgggcaaacctgcgtctgcgccaaccgcctgtatgtgcaggacggcgtgtatgaccgttttgccgaaaaattgcagcaggcagtgagcaaactgcacatcggcgacgggctggataacggcgtcaccatcgggccgctgatcgatgaaaaagcggtagcaaaagtggaagagcatattgccgatgcgctggagaaaggcgcgcgcgtggtttgcggcggtaaagcgcacgaacgcggcggcaacttcttccagccgaccattctggtggacgttccggccaacgccaaagtgagcaaagaagagacgttcggccccctcgccccgctgttccgctttaaagatgaagctgatgtgattgcgcaagccaatgacaccgagtttggccttgccgcctatttctacgcccgtgatttaagccgcgtcttccgcgtgggcgaagcgctggagtacggcatcgtcggcatcaataccggcattatttccaatgaagtggccccgttcggcggcatcaaagccagcggtctgggtcgtgaaggtagcaagtatggcatcgaagattacttagaaatcaaatatatgtgcatcggtctttaactggagaatgcgaatgaacagcaataaagagttaatgcagcgccgcagtcaggcgattccccgtggcgttgggcaaattcacccgattttcgctgaccgcgcggaaaactgccgggtgtgggacgttgaaggccgtgagtatcttgatttcgcgggcgggattgcggtgctcaataccgggcacctgcatccgaaggtggtggccgcggtggaagcgcagttgaaaaaactgagccacacctgcttccaggtgctggcttacgagccgtatctggagctgtgcgagattatgaatcagaaggtgccgggcgatttcgccaagaaaacgctgctggttacgaccggttccgaagcggtggaaaacgcggtaaaaatcgcccgcgccgccaccaaacgtagcggcaccatcgcttttagcggcgcgtatcacgggcgcacgcattacacgctggcgctgaccggcaaggtgaatccgtactctgcgggcatggggctgatgccgggtcatgtttatcgcgcgctttatccttgcccgctgcacggcataagcgaggatgacgctatcgccagcatccaccggatcttcaaaaatgatgccgcgccggaagatatcgccgccatcgtgattgagccggttcagggcgaaggcggtttctacgccagcagcccagcctttatgcagcgtttacgcgctctgtgtgacgagcacgggatcatgctgattgccgatgaagtgcagagcggcgcggggcgtaccggcacgctgtttgcgatggagcagatgggcgttgcgccggatcttaccacctttgcgaaaagcatcgcgggcggcttcccgctggcgggcgtcaccgggcgcgcggaagtaatggatgccgtcgctccaggcggtctgggcggcacctatgcgggtaacccgattgcctgcgtggctgcgctggaagtgttgaaggtgtttgagcaggaaaatctgctgcaaaaagccaacgatctggggcagaagttgaaagacggattgctggcgatagccgaaaaacacccggagatcggcgacgtacgcgggctgggggcgatgatcgccattgagctgtttgaagacggcgatcacaacaagccggacgccaaactcaccgccgagatcgtggctcgcgcccgcgataaaggcctgattcttctctcctgcggcccgtattacaacgtgctgcgcatccttgtaccgctcaccattgaagacgctcagatccgtcagggtctggagatcatcagccagtgttttgatgaggcgaagcagtaacgccgctcctatgccggaggcgacgctgcgcgtcttgtccggcctacggggatccaggtcggataaggcgtttacgccgcatccgacaatctgtacgtgaacaggaagaaatctatgttggccgggtaaggcggagccgctctccggcaaaaagaatcaataacaattatacgcgtgacccggcgcgggaaatgtcggggcgctctcccaagtgacacactttcgagaggattcaggatggggcaaagtagccaaccacatgagttaggcggcgggctgaagagtcgccacgtcaccatgttgtctattgccggtgttatcggcgcaagtctgtttgtcggttccagcgtcgccatcgccgaagcgggcccggcggtattactggcctatctgttcgccgggctactggtggttatgattatgcggatgttggcggaaatggcggttgccacgcccgataccggtagcttttccacctatgccgataaagccattggtcgctgggcgggctataccatcggctggttgtactggtggttttgggtactggttatcccgctggaagccaacatcgccgccatgatcctgcacagttgggttccaggcattcccatctggttattttccctcgtcattaccctcgccttaactggcagtaacttattaagcgttaaaaactacggcgaatttgagttctggctggcgctgtgcaaagtcatcgctatcctggcctttattttccttggtgcagtcgcaattagcggtttttacccgtatgccgaagtgagcgggatcagtagattgtgggatagcggcggctttatgcccaacggtttcggtgcggtattaagcgcgatgttgatcaccatgttcagctttatgggcgcagaaattgtcaccattgccgccgcggaatccgacacgccggaaaaacatattgtccgcgccaccaacagcgttatctggcgtatttctatcttctatttatgttctatttttgtcgtcgtggcattaattccgtggaatatgcccggactaaaagccgtcggttcttatcgcagcgtactggaattgctcaatattccccatgcgaaattaatcatggactgcgtgatattactttccgtaaccagttgcctgaacagcgcgctgtataccgcgagtaggatgctctactccttaagtcgtcgcggtgatgctcccgcggtaatgggtaaaatcaaccgcagtaaaaccccgtacgtggcggtgttactctccaccggcgcggcattcttaacggtggtggtgaactattacgcgcctgcgaaggtatttaaatttctgatcgacagctccggcgctatcgccctgctggtttatttagtcatcgccgttagtcagttgcggatgcgcaaaattctgcgagcagaaggaagcgaaattcgcttgcgaatgtggctttatccgtggctcacctggctagtcatcggctttattacctttgtgttggtagtgatgctattccgtccggcgcaacagttagaagtgatctccaccggcttattagcgatagggattatctgtaccgtgccaattatggctcgctggaaaaagctggtattgtggcaaaaaacacccgttcataatacgcgctgatcatgatcaggagtcacaccatgaccattacgtctctggatggctatcgctggctgaagaacgatattattcgcggtaattttcaaccggatgaaaaattacgaatgagtttgctgacaagccgttatgcacttggcgttgggccgttacgggaagctcttagccaactggtggcggaacggctggtcacggtggtgaatcaaaaagggtatcgggtggcgtctatgagtgagcaggagctgctcgatattttcgacgcccgcgccaatatggaagcgatgttagtgagtctggcgattgcccgcggtggcgatgagtgggaggcagacgttctcgcaaaagcgcatctgctgagtaagcttgaggcctgtgacgccagcgagaaaatgcttgatgagtgggatctgcgtcatcaggcgtttcatacggcaattgtggcgggctgtggttctcactatttgctgcaaatgcgtgaacggttgtttgatctggcggcgcgttatcgatttatctggctgcggcgaacggtgcttagcgtggaaatgctggaggataaacacgatcagcaccagaccctgactgcggcggtactggcgcgagataccgcgcgcgccagtgagttaatgcgccagcatttactgacgccaattcccattatccagcaggcgatggctggcaattaattactcttccggaatacgcaacacttgccccggataaattttatccgggctttttagcatcggtttattcgcttcgaagattttattgtacagattagcgttaccgtagacctgtttggaaatggcactcagagtgtcgccagacttaacggtataaaactggctggcagtggctggtgtcgccgttttcacctgatcatcgacactggcaataccggaaatattccccaccgcaacaaggattttctccttcgcctcctgactcaggccgtcaccagtgaccgtcgctttgccgtcggcaatttgaatattcactttatcggcatccggtataccggttttgttcagatgctcctgcaccttcttcgcctgatcgtctttatcgtgctgacctgtaaccgcgtcccagagtttttctccggcatctttcacaaaattgaacagacccatagctacctcattcgttaacggaaacactcagaaagtgtagcagaggaacgcggcgcgttaacgccgcggggatgagcacaggtttaatcgcgggtttgcacccagaacgcgtgaatcaaaccggggatatacccaagcagtgtcaacagaatattaataatgaacgcccaaccgaaccctttaccgagcagcacgccgagcggcggcagaatgatggtgatgacgattctccagaaacccatatgtactccctataagaaaattactcattgtttaaaaagagattttatctcttaagcgtagtaattttagcggagcctgccagtttcagcttacgcttttactctcatttacgctgctgaggctggtatatgttgcatttttagtttagagtttacttaatttagaaaatacttaaataaatatgactgaactcgcgcaattacaggccagtgccgaacaggcagcggccttattgaaagcaatgagccaccctaaacgattgctgattctgtgcatgcttagcggttcccccggcaccagcgcgggagagctgacgcgcattaccggactgagtgcctctgcgacaagtcagcatctcgctcgtatgcgggacgaagggcttatcgacagccaacgggatgcccaacgcattctatattccattaaaaatgaggcggtaaatgccattatcgccaccctgaaaaatgtctattgtccgtaaggagtcactatggctttgacaaccattagcccgcatgatgcacaagaattaatcgcacgcggcgcaaagttaatcgatattcgtgatgctgatgaatatcttcgtgaacatattcctgaagcagatctggctccattatccgtgctggaacagagtggtcttccggctaaattacgtcacgagcaaattatattccactgccaggcaggtaaacgcaccagtaataatgccgataaattagcagcgattgccgcccccgcagaaatctttttactcgaagatgggattgatggctggaaaaaagcaggattgccagtagcggtaaataaatctcaacccttgccgttaatgcgccaggtgcagatcgctgcgggtggtttaatattaatcggcgttgtactgggttataccgtaaatagcggtttcttcttattaagtggctttgttggtgccgggttactgtttgcaggaatcagcggtttttgtggaatggcaaggttgttagataagatgccgtggaaccaacgagcttgagaagcgacgccggacgcgccctagcagcgacatccggcctcagtaattagatcaggaaatcgtcgagagatttaccttctgccagcgcctgagcaattggcttcggtgtacggccctgaccggtccaggttttagtttcaccgttaacatcggtgaatttatatttcgccggacgcggctggcgttttttaccagcgcgtggtgcagcagcagagctattacccaataactcttccgggttaattccgtcagctttcatcagctccagccaggtgctaattttttcctggcgctctgccagttcacgctgctgctgttcttcttcttcacgtctttctttagtgacaaccctgaatttttcgagcatttcttcaagaacgtcaatggagaattcgcgagccatcgcacggagggtgcgaatgttatttaaactttgtaacattacggacataataaagaaaaccttttaacgccaaaacaaaaaaagtatttcgtcgcgtagtgtaagcgatcacttattatatttccacaaaatttaatctatttacagtcctgcgcgagattatttcagctgttattttctgaaactctcagaataatttcaagattatatattagccattttgatgagtaatttagattattggtgaacagagcggcgctctctgctcgctaattccgcaagcctgacaaaatcaaagtgaataaaaatgcaatataacagaataaaagaaaacatccatcactggtgctttctgctgttaatgtacattgtctggcataaaaaatgctgaaaatgacccagctactacatacaccgaattctctacgcttatagcgttacctcacccccaaactttcattagtgatattaaaggtaaggccatatctaattgatttaattaaaaataaatcatatcggcatgtaaaaatccacaatgtacaaaaaacgagccgttacggaatattttatctacaaaaactgactaaataaaaatttttcactaattgattagtcatagccagcgatatacgctatgcgaaaatgcagatggcaatgagatccactgctttcatctccattaacatcccattacgcttttattaaggagcattagcatgttcagtccgcagagtcgcttgcgtcatgcagttgcagatacgttcgcgatggttgtttactgttctgtcgtgaacatgtgtattgaagttttcctctccggaatgagcttcgaacagtctttttattccagattggtagcgattccggtgaacatcttaattgcatggccatacggtatgtaccgtgatctgtttatgcgcgcggcacgcaaagttagcccgagcggctggataaaaaatctggcggatatcctggcttatgtgacgttccagagtccggtgtatgtggcgatcttgttagtggtgggcgcagactggcatcagattatggcggcggtcagtagtaacatcgttgttagcatgttgatgggggcggtttatggctacttcctcgattattgccgccgactgtttaaagtcagccgttaccagcaggtaaaagcctgactcttcttttcgcgactggcatcgccagtcgcgtctttaactggcttcgccaaataaaccattcaaataacgttcaagcgcaacacggctactaaagccatgcgggataccgtaatgctcgtgtcgctcgcctgctaaatagagcggaaattgctggtaatgatcgcaagttttaatatcggaagcgggttcagccagtgtgctactgcgttcttttaatgttggatgaattaccagagcggtacgtcccattcgcgcttcgcgattaacatagacataattttccccacggcggtaaccatacgctttctgggttaccacatcgacagtaaaaccgactttttcaagtacgcgcgccacctcgtctggtcgtaaatacatatttgatcctcgttattatcaaccgcgggcctaccttacctgattgcgcattcacaacgctttcagaaaagtccataaagccgcgatgaacctcagttaagaaaattatggtctacactgaaaattacatcgaattctaatgggggatcatatgtttaaccgaccgaaccgcaacgacgttgatgatggcgtgcaggatatccagaatgatgtcaatcaattagctgacagcctcgaatctgtattgaagtcctggggcagcgacgccaaaggggaagctgaagccgcacgcagtaaagctcaggcattgctgaaagaaaccagggcgcgaatgcatggtcgtactcgcgtccagcaagccgcgcgcgatgccgttggctgcgcggattcttttgttcgtgaaagaccctggtgtagcgtgggtacagcagctgcggtaggtatttttatcggcgcactgttaagcatgcgcaaaagctaatgcaaaaatgataataaatacgcgtctttgaccccgaagcctgtcttcggggtttctttttgcctggtgaatcacaaaaatccccctaccccgtcacgctcatatccagggtaatttcgaccactatttgctatatattgtgtggttgaatcttttttcaactacatctagtatctctgtatcaacagagagacaacccgacgcgtatcatcgcgccgtatcttcattttaaacggaaatacgaatcatgcgcattactatttacactcgtaacgattgcgttcagtgccacgccaccaaacgggcgatggaaaaccggggctttgattttgaaatgattaatgtcgatcgcgttcctgaagcggcagaagcgttgcgtgctcagggctttcgtcagttgccggtagtgattgctggcgatcttagctggtctggtttccgtccggacatgattaaccgtctgcatccagcgccacacgcggccagtgcatgagccagctcgtctacttctccagcagctccgaaaacacgcagcgttttatcgaacgtttaggtctgcccgcggtgcgcatcccgctcaatgagcgggaacggattcaggtagacgagccttacatcctgatcgtgccctcttacggcggcggcggtacggctggcgcggtgccacgacaggtaattcgctttttaaacgacgagcacaaccgggcgttgcttcgcggcgttattgcttctggtaatcgcaactttggtgaggcgtatggccgcgccggagatgtgattgcccggaaatgcggcgtgccgtggctgtaccgttttgaactcatgggtacgcaaagcgatatcgaaaacgttcgtaaaggagtaaccgaattttggcaacgacaaccgcagaatgcctgacgcaggaaacgatggattaccacgcgctgaatgcgatgcttaacctctacgatagcgcaggtcgcattcagttcgataaagaccgccaggccgttgacgcctttattgcgacgcatgtgcgtccgaacagtgtgaccttcagtagccagcagcagcgcctgaactggctggtcaacgaaggttactatgatgaaagcgttcttaatcgctactctcgcgactttgtcattacgctgtttacccacgcacacaccagcggttttcgtttccagacattcctcggggcatggaagttttacaccagctatacgttgaagacattcgacggtaaacgttatctggaagattttgccgatcgagtaacgatggtggcgctgacgctggcacaaggcgatgagacgctggcgttgcaactgaccgatgaaatgctgagtggacgctttcagccagccacgccaacattcctcaactgcggtaagcagcagcgcggcgaactggtttcctgttttttgctgcgtattgaagacaatatggagagcattggtcgggcggtaaattccgcactgcagctgagcaaacgcggcggcggcgtagcatttttgctgagcaatctgcgagaagcgggcgcgccaattaaacgtattgaaaatcaatcttctggcgtaattccggtgatgaaaatgctggaagacgcattttcctatgccaaccaactcggcgctcgtcagggggctggtgcagtctatttacatgctcatcatcccgatattctgcgttttctcgacacgaaacgggaaaatgccgacgaaaaaatccgcattaaaacactgagccttggcgtggtgatcccggatatcactttccatctggcaaaagagaatgcgcagatggcgctgtttagcccttatgacgtagagcgagtttatggcaagccgtttgccgatgtggccatcagccaacactatgacgaactggttgccgatgaacgcattcgcaaaaaatacctcaacgcccgtgatttcttccagcgactggcagaaatccagtttgagtccggctatccctacatcatgtatgaagacacggtaaaccgtgctaaccctatcgccgggcgcataaatatgagtaatctctgcagtgaaattttgcaggttaacagcgccagtgagtatgacgagaatctcgactatacccgcacaggccatgatatttcctgcaatttaggtagcttgaatattgcgcacaccatggattcccccgattttgcccgcacggtagagactgccgtgcgcggtttaacggcagtaagtgatatgagtcatatccgcagcgtgccgtccatcgaagccggaaatgccgccagccacgccatcggactggggcagatgaatttacacggctatctggcgcgagaaggcatcgcttatggtagcccggaagcactggatttcaccaatctctatttctatgccatcacctggcatgcactgcgtaccagcatgttgctggcacgcgaacgcggtgaaaccttcgccgggttcaaacagagtcgctatgccagtggtgaatattttagccaatatctgcaagggaactggcagccgaaaacggcgaaagttggcgaactgtttacccgtagcggtattacgttacctacccgtgagatgtgggcgcagctgcgcgacgacgtgatgcgctacggcatatacaaccagaatcttcaggcggtgccgccaaccggttctatctcttatatcaaccatgctacgagcagtattcatccgattgtggcgaaagtagagatacgcaaagagggcaaaacaggacgcgtttactaccctgccccgtttatgactaacgagaatctggcgctgtatcaggacgcttacgaaattggcgcagaaaagatcatcgacacctacgcggaagcgactcgccatgtcgatcaggggctgagcctgacgctttttttccccgataccgccaccactcgcgatatcaacaaagcgcagatttacgcctggcgcaagggtatcaaaacgctctattacatccgcctgcgtcagatggcgctggaaggcactgaaattgaaggctgcgtctcctgtgcactttaaggaatatctatgaaactcagtcgtatcagcgccatcaactggaacaagatatctgacgataaagatctggaggtgtggaatcgcctgaccagcaatttctggctaccagaaaaggtgccgctgagcaacgatattcctgcctggcagacattaactgtcgtagaacaacaactgacgatgcgcgtttttactggcctgacgctgctcgacacgctgcaaaatgttatcggcgcgccttctctgatgcccgatgcactcacgcctcatgaagaagcggtattaagcaatatcagctttatggaagcggttcatgcccgctcttacagtagcattttcagcacgctatgccagaccaaagatgtcgatgccgcctacgcctggagtgaagaaaacgcaccgttgcagcgaaaagctcagattattcagcaacattatcgcggtgatgatccgctgaaaaagaaaatcgccagtgtgtttcttgaatcttttttgttctattccggtttctggctgccgatgtatttttccagccgcggaaagctgaccaataccgcggacctgatccgtctgattatccgcgatgaagcagtccacggttactacataggctataaatatcagaaaaacatggaaaagatatctctgggacaacgtgaagagttgaagagtttcgccttcgatttgttgctggaactctacgacaacgagttgcaatacaccgatgagctgtacgccgaaaccccgtgggctgacgatgtgaaagcgtttctctgttacaacgccaataaggctttgatgaatctgggctacgaaccgttatttcccgcagaaatggcggaagtgaatccggcaatcctcgccgcgcttagcccgaatgccgatgaaaatcacgatttcttttccggtagtggctcctcttatgtgatggggaaagcggttgaaacagaagatgaagactggaatttctgagggtgttattttcaaaaatatcactacccgcagcagggaaataattcccgccaaatagctttttatcacgcaaataatttgtggtgatctacactgatactctgttgcattattcgcctgaaaccacaatattcaggcgttttttcgctatctttgacaaaaaatatcaactttctcgatttgctctcagcccttatatcacgggaaattccggcgatttgctcgcatcaatattcatgccacatttgccatcaggggttgcctcagattctcagtatgttagggtagaaaaaagtgactatttccattgggtaatatatcgacatagacaaataaaggaatctttctattgcatggcaattaaattagaaattaaaaatctttataaaatatttggcgagcatccacagcgagcgttcaaatatatcgaacaaggacttagtaaagaacaaattctggaaaaaactgggctaagccttggcgtaaaagacgccagtctggccattgaagaaggcgagatatttgtcatcatgggattatccggcagcggtaaatccacaatggtacgccttctcaatcgcctgattgaacccacccgcgggcaagtgctgattgatggtgtggatattgccaaaatatccgacgccgaactccgtgaggtgcgcagaaaaaagattgcgatggtcttccagtcctttgccttaatgccgcatatgaccgtgctggacaatactgcgttcggtatggaattggccggaattaatgccgaagaacgccgggaaaaagcccttgatgcactgcgtcaggtcgggctggaaaattatgcccacagctacccggatgaactctctggcgggatgcgtcaacgtgtgggattagcccgcgcgttagcgattaatccggatatattattaatggacgaagccttcagcgcgctcgatccattaattcgcaccgagatgcaggatgagctggtaaaattacaggcgaaacatcagcgcaccattgtctttatttcccacgatcttgatgaagccatgcgtattggcgaccgaattgccattatgcaaaatggtgaagtggtacaggtcggcacaccggatgaaattctcaataatccggcgaatgattatgtccgtaccttcttccgtggcgttgatattagtcaggtattcagtgcgaaagatattgcccgccggacaccgaatggcttaattcgtaaaacccctggcttcggcccacgtagcgcactgaaattattgcaggatgaagatcgcgaatatggctacgttatcgaacgcggtaataagtttgtcggcgcagtctccatcgatagccttaaaaccgcgttaacgcagcagcaaggtcttgatgcggcgctgattgatgcgccgttagcagtcgatgcacaaacgcctcttagcgagttgctctctcatgtcggacaggcaccctgtgcggtgcccgtggtcgacgaggaccaacagtatgtcggcatcattagcaaaggaatgctgctgcgcgctttagatcgtgagggggtaaataatggctgatcaaaataatccgtgggataccacgccagcggcggacagtgccgcgcaatccgcagacgcctggggtacaccgacgactgcaccgactgacggcggtggtgctgactggctgaccagtacgcctgcgccaaacgtcgagcattttaatattctcgatccgttccataaaacgctgatcccgctcgacagttgggtcactgaagggatcgactgggtcgttacccatttccgtcccgtcttccagggcgtgcgcgttccggttgattatatcctcaacggtttccagcaattgctgctgggtatgcccgcaccggtggcgattatcgttttcgctctcatcgcctggcagatttccggggtcggaatgggtgtggcgacgctggttagcctgattgccatcggcgcaatcggtgcctggagccaggcaatggtgactctggcgctggtgttaaccgccctgctgttctgtatcgtcatcggtttgccgttggggatatggctggcgagaagtccgcgagcggcgaaaattattcgtccactgcttgatgccatgcagaccacgccagcgtttgtttatctggtgccaatcgtcatgctatttggtatcggtaacgtgccgggcgtggtggtgacgatcatctttgctctgccgccgattatccgtctgaccattctggggattaaccaggttccggcggatctgattgaagccagccgcagtttcggtgccagcccgcgccagatgctgttcaaagttcagttaccgctggcgatgccgaccattatggcgggcgttaaccagacgctgatgctggccctttctatggtggtcatcgccagcatgattgccgtcggcgggttgggtcagatggtacttcgcggtatcggtcgtctggatatggggcttgccaccgttggcggcgtcgggattgtgatcctcgccattatcctcgatcgtctgacgcaggccgttgggcgcgacagtcgcagtcgcggcaaccgtcgctggtacaccactggccctgttggtctgctgacccgcccattcattaagtaactctgcacttgcccggtgacgccgggcattatcaccctgccaaaaaaaggaataacaatgcgacatagcgtactttttgcgacagcgtttgccacgcttatctctacacaaacttttgctgccgatctgccgggcaaaggcattactgttaatccagttcagagcaccatcactgaagaaaccttccagacgctgctggtcagtcgtgcgctggagaaattaggttataccgtcaacaaacccagcgaagtagattacaacgttggctacaccagccttgcttccggcgatgcaaccttcaccgccgtgaactggacgccactgcatgacaacatgtacgaagctgccggtggcgataagaaattttatcgtgaaggggtatttgttaacggcgcggcacagggttacctgatcgataagaaaaccgccgaccagtacaaaatcaccaacatcgcacaactgaaagatccgaagatcgccaaactgttcgataccaacggcgacggaaaagcggatttaaccggttgtaaccctggctggggctgcgaaggtgcgatcaaccaccagcttgccgcgtatgaactgaccaacaccgtgacgcataatcaggggaactacgcagcgatgatggccgacaccatcagtcgctacaaagagggcaaaccggtgttttattacacctggacgccgtactgggtgagtaacgaactgaagccgggcaaagatgtcgtctggttgcaggtgccgttctccgcactgccgggcgataaaaacgccgataccaaactgccgaatggtgcgaattatggcttcccggtcagcaccatgcatatcgttgccaacaaagcctgggccgagaaaaacccggcagcagcgaaactgtttgccattatgcagttgccagtggcagatattaacgcccagaacgccattatgcatgacggcaaagccagtgaaggcgatattcagggacacgttgatggttggatcaaagcccaccagcagcagttcgatggctgggtgaatgaggcgctggcagcgcagaagtaatttttattcgggcggataaggcgtttttgccgcatccgccgttctgtgcacaatgcctgatgcgacgctggcgcgtcttatcatgcctacaaaccacatcgcacatttcaacaatctatctttcatcccatattcatcaacatccgctattattgatttccagcttaatcatcacctgatgaacaaaaataatgactaaacctaatcatgagcttagcccggcgctgatcgtgctgatgtctatcgccaccggtctggcggtagccagtaactattacgcccagccattgctcgacaccatcgcgcgtaacttttccctttccgccagtagcgcaggctttattgttaccgccgcgcagttgggctatgccgcaggtctactgtttcttgttcccctcggtgatatgtttgaacgccgccgcctgattgtcagcatgaccttactggcggcatgttgattaccgccagcagtcagtcgctggcgatgatgatcctcggtacggcattaaccggtttattcagtgtcgtggcacaaattctggttccgctggcagcgacgctggctagtccggataaacgcggcaaagtggttggcactattatgagcggtctgctgttggggatcttgctggcacggacagttgccggattgctggcgaatctcggcggctggcgcaccgtcttttgggttgctagcgtgttaatggcactgatggcgctggcattatggcgtggtctgccacaaatgaaaagtgaaacccacctcaactacccacagttgttgggttccgttttcagtatgtttatcagcgataaaattctgcgtacccgcgcgttgctgggctgcctgacctttgccaatttcagcattctctggaccagtatggcctttttgcttgccgctccaccttttaactacagcgatggtgtcattggtctgtttggacttgcgggagctgccggagcgttgggcgctcgtccggcgggcggttttgccgataagggcaaaagccaccacaccacaactttcggtctgctgctgctattacttagttggctggcgatctggtttggtcacacttccgtactggcgttgattatcggaatcctggtgctggatctcaccgtgcagggcgtgcatatcactaaccagacggtaatttatcggatacatcctgatgcgcgcaatcgcctgaccgcaggttacatgactagctactttattggcggtgccgccggtagcctaattagtgccagtgcctggcaacatggcggttgggctggcgtttgtctggctggcgcgacgattgccctggttaacttactggtctggtggcgaggttttcatcgtcaggaagccgcaaattaagcaatcagcaaccgttttcgtggctttacacttataagggtgttaagaagcccatcagtctgataaggttaagatattcattcagtctatttataatattaacaatcgttaagcgtacactctatggaaagccctactccacagcctgctcctggtagcgcgaccttcatggaaggatgcaaagacagtttaccgattgttattagttatattccggtggcctttgcgttcggtctgaatgcgacccgtctgggattctctcctctcgaaagcgtttttttctcctgcatcatttatgcaggcgcgagccagttcgtcattaccgcgatgctggcagccgggagtagtttgtggattgctgcactgaccgtcatggcaatggatgttcgccatgtgttgtatggcccgagtctgcgtagccgtattattcagcgtctgcaaaaaagcaaaaccgccctgtgggcgtttggcctgacggatgaggtttttgccgccgcaaccgcaaaactggtacgcaataatcgccgctggagcgagaactggatgatcggcattgccttcagtagttggagtagctgggtatttggtacggtaataggggcattctccggcagcggcttgctgcaaggttatcccgccgttgaagctgcattaggttttatgcttccggcactctttatgagtttcctgctcgcctctttccagcgcaaacaatctctttgcgttaccgcagcgttagttggtgcccttgcaggcgtaacgctattttctattcccgtcgccattctggcaggcattgtctgtggctgcctcactgcgttaatccaggcattctggcaaggagcgcccgatgagctatgaggttctgctgcttgggttactagttggcgtggcgaattattgcttccgctatttgccgctgcgcctgcgtgtgggtaatgcccgcccaaccaaacgtggcgcggtaggtattttgctcgacaccattggcatcgccagcatatgcgctctgctggttgtctctaccgcaccagaagtgatgcacgatacacgccgtttcgtgcccacgctggtcggcttcgcggtactgggtgccagtttctataaaacacgcagcattatcatcccaacactgcttagtgcgctggcctatgggctcgcctggaaagtgatggcgattatataacccacaagaatcatttttctaaaacaatacatttactttatttgtcactgtcgttactatatcggctgaaattaatgaggtcatacccaaatggatagtagctttacgcccattgaacaaatgctaaaatttcgcgccagccgccacgaagattttccttatcaggagatccttctgactcgtctttgcatgcacatgcaaagcaagctgctggagaaccgcaataaaatgctgaaggctcaggggattaacgagacgttgtttatggcgttgattacgctggagtctcaggaaaaccacagtattcagccttctgaattaagttgtgctcttggaagttcccgtaccaacgcgacgcgtattgccgatgaactggaaaaacgcggttggatcgaacgtcgtgaaagcgataacgatcgccgctgcctgcatctgcaattaacggaaaaaggtcacgagtttttgcgcgaggttttaccaccgcagcataactgcctgcatcaactctggtccgcgctcagcacaacagaaaaagatcagctcgagcaaatcacccgcaaattgctctcccgtctcgaccagatggaacaagacggtgtggttctcgaagcgatgagctaacgcgtcatctcgctcaaaaatccagatttataaaagaaaaaatgactggccagcatcgcaacatgctggcctttttggcaagcaggtcggctcagccgatgagttaagaagatcgtggagaacaatatgagcgcaaatgcggagactcaaaccccgcagcaaccggtaaagaagagcggcaaacgtaagcgtctgctcctccttctcaccttgctctttataattattgccgtagcgatagggatttattggtttttggtactgcgtcacttcgaagaaaccgatgacgcatacgtggcagggaatcaaattcaaattatgtctcaggtgtctggcagcgtgacgaaagtctgggccgataacaccgattttgtaaaagaaggcgacgtgctggtcactctcgacccgacagatgctcgccaggcgtttgaaaaagccaaaactgcactggcttccagcgttcgccaaacccaccagctgatgattaacagcaagcagttgcaggcgaatattgaggtgcagaaaatcgccctcgcgaaagcacaaagcgactacaaccgccgtgtgccgctgggcaatgccaacctgattggtcgcgaagagctgcaacacgcccgcgacgccgtcaccagtgcccaggcgcaactggacgtcgcgattcaacaatacaatgccaatcaggcgatgattctggggactaaactggaagatcagccagccgtgcaacaggctgccaccgaagtacgtaacgcctggctggcgctggagcgtactcgtattatcagtccgatgaccggttatgtctcccgccgcgcggtacagcctggggcgcaaattagcccaacgacgccgctgatggcggtcgttccagccaccaatatgtgggtggatgccaactttaaagagacgcagattgccaatatgcgtatcggtcagccggtcactatcaccacggatatttacggcgatgatgtgaaatacaccggtaaagtggttggtctggatatgggcacaggtagcgcgttcagtctgcttccagcgcaaaatgcgaccggtaactggatcaaagtcgttcagcgtctgcctgtgcgtatcgaactggaccagaaacagctggagcaatatccgctgcgtatcggtttgtccacgctggtgagcgtcaataccactaaccgtgacggtcaggtactggcaaataaagtacgttccactccggtagcggtaagcaccgcgcgtgaaatcagcctggcacctgtcaataaactgatcgacgatatcgtaaaagctaacgctggctaatccagaggtgcgtgtgatgcaacagcaaaaaccgctggaaggcgcgcaactggtcattatgacgattgcgctgagtctggcgacattcatgcaggtgctggactccaccattgctaacgtggcgatccccactatcgccgggaatctgggcagtagcctcagccagggaacgtgggtaatcacttctttcggggtggcgaatgccatcagcatcccgcttaccggctggctggcaaagcgcgtcggggaagtgaaactgttcctttggtccaccatcgcctttgctattgcgagctgggcgtgtggtgtctccagcagcctgaatatgctgatcttcttccgcgtgattcaggggattgtcgccgggccgttgatcccgcttagccaaagtctattgctgaataactacccgccagccaaacgcagcatcgcgctggcgttgtggagcatgacggtgattgtcgcgccaatttgcggcccgatcctcggcggttatatcagcgataattaccactggggctggatattcttcatcaacgtgccgattggcgtggcggtggtgttgatgacactgcaaactctgcgcggacgtgaaacccgcaccgaacggcggcggattgatgccgtggggctggcactgctggttattggtatcggcagcctgcagattatgctcgaccgcggtaaagagctggactggtttagtagtcaggaaattatcatccttaccgtggtggcggtggtggctatctgcttcctgattgtctgggagctgaccgacgataacccgatagtcgatctgagcttgtttaagagccgcaacttcaccatcggctgcttgtgtatcagcctcgcgtatatgctctacttcggcgctattgttctgctgccgcagttgttgcaggaggtctacggttacacggcgacctgggcaggtttggcctctgcgccggtagggattattccggtgatcctgagcccgattatcggccgcttcgcgcataaactggatatgcggcggctggtaaccttcagctttattatgtatgccgtctgcttctactggcgtgcctatacctttgaaccaggtatggattttggcgcgagcgcctggccgcagtttatccaggggtttgcggtggcctgcttctttatgccgctgaccaccattacgctgtctggtttgccaccggaacgactggcggcggcaagcagcctctctaactttacgcgaacgctggcggggtctatcggcacgagcataaccacgaccatgtggaccaaccgcgagagcatgcaccatgcgcagttgactgagagcgtaaacccgttcaacccgaatgcccaggcgatgtacagtcaactggaagggcttgggatgacgcaacagcaggcaagtggctggattgcccagcagatcaccaatcaggggctgattatttccgccaatgagatcttctggatgagtgccgggatattcctcgtcctgctggggctggtgtggtttgctaaaccgccatttggcgcaggtggcggcggaggcggtgcgcactaagtacaactaagccagttcatttgaactggcttttttcaattaattgtgaagatagtttactgattagatgtgcagttcctgcaacttctctttcggcagtgccagttcttcgttgctgttgatgcgtacgtcacgttccagaatgctacgcgcaatatcctgcgcttcctgcaagctgtgcatctggtaagtgccacactggtagacgttcagttccgggatctgattctgatcctgcactttcagcacgtcttccattgccgttttccaggcatcagcaacacgctgctcatctggcgtaccaatcagactcatataaaaaccggtgcggcagcccattgggctgatatcgataatctctacaccattaccgttaagatggttacgcataaaaccagcaaacaggtgctccagggtatggatccctctttctggcatcacttctttgttcggcacgcagaagcgcagatcgaacacggtgattgcgtcgccatgcggggtgttcattgttttcgccacccgaactgcaggcgcttccatccgggtatgatcgactgtgaagctatctaacaacggcatttagccacctccggtaatttttttaaaaattttctgaactctttcttcccaggcgagtctgagtatatgaaagacgcgcatttgttatcatcatccctgaattcagagatgaaattttggccactcacgagtggcctttttcttttctgtcaggcgtgtttttccagccacaccgcaaacggttcggtatcagcggcttccatttcctgctgacggcgttcagacgcctcgcgctcggctacaaaatcctcttcgcgcagaatttccagcggctcttcacgcagcagattacggtaggcttctgcaaatgctttgcctgttccgccaataccagtatcaatcatagaccttaagatacgggcagagaaagtcagatcgggattatcgaagcaggcaaccagttcatcacacactttctgatacgcttcgccgccgttaatactatccagcgtttgcgcgacgcgtttcagatcgcggaacagatctttacccacctgcggtaacgggaactgtgcggtttcgcagccgatacccagcgtcagacccggtttgcgaccttcgaggatcacccggttccagttaacgcgtgtacaggcaagttcgctactgctcatttccggtgcatcagccagcgcacaccagaccataaacaggtcgaggaatcgcacctgctgttcatctacaccaatcgggctgaacgggttgatgtccaggctacgcacttcaatatattcaatgccgccacgtaacagcgcatcagaagggctctcgccgctgcgggtaacgcgttttggacgaatcggcgcgtacagttcgttttcaatctgcaacacgttgctgttgatttgcagcctcttaccgtctttctcaataccaatcttcgcgtactcttcgcttggcgttttgattgcctgtttaaggcccgctacgtactcgtaaagatcgttgaaggtaataccaagattgctttggcttttattggtatagccgagatcgctcaaacgaagagaggtcgcatacggcaggtaatacataccgcactcggttttctcaaacggcaggctcgttggttttccttgcaggaaagaagaacaaatcgccggagatgcaccaaacagataaggaatgacccaaccgaaacgatagtaattgcggataacgcggaaatagcccgcagaaattttctctttggcatcagcgccgctgatatcaccgcacttcgcttgccagaatgccattggcaaagagaaattgtagtgcacgccggaaatggtttgcatcagcgcgccgtagcgatttttcagcccttcacgatacagcgttttaaagcgtccggtgttagaagtgccgtactgtgccagttcgatgtcctgaccttctgcgatgtagcatggcatacttaacggccacatccgctcatcgcccatattgcgcgccgtataacgatgcagatcgcgcataaaggtcagcatatgttcaatatcaccatccactggtgtaatgaattccagcaatgcttccgcaaaatcggtagtaatccatttgtgcgtcagtgcggaacctaatgcttcaggatgacctgttgttgccagtgtgccatcagcattaacacgcaaagtttcgcgctccagcccacgctgtatcccctttaacgcctgaggatgtttttccagccaggccagcgcctgacttacgtccgggatcaaattgacctcccgcctgtcaaaatcgttttaattagcataactgtaatggtgaccatatgtgcaggcctacaattagtgccaccacatcatgccctgaacggtcgctgctgcaactgcaacatagcgtaacgctttaccaaggcacaaaaaaaagattaccggtccccagctgatgcgcatccatcccgctaacagacacagtaaatcgccaaccacgggcatccagcttaataatagcgtgactgcaccatagcgtttcagccagccggtagctttctcttgccagcggcttgttttacgcaatggaaagaaacgcccaaggataacgttagttaaccctccaaggctattacccattgttgctgttaaaactaaaacccagggatgactgatcccggaaagcaacattgccaccagcacgacttcggagttgccgggtaatagtgtagcgctgagaaaactactggcaaacaagctgaaaaggcttaacgcttcactcacagcaagcgaacatccacggcgtccatgcctgctgcacgggccgcctgaataccgaaatcggcatcttcaaagaccacacactgcgtcggttgcacgcccatacgctgcgcgcacaacaaaaatgtgtctggcgcgggtttatggtgtttgacgtgatcggcagcgacgacggcgtcaaaataatggcgtaatcccaggtgcgccagcaatgcctcagcgatggcgctttcactccccgttcctacagccattgggcgacgaccatgccaacttttcaccacatcaacaagaggaagcggttcgacgctatccagcagcatacttcttactgcttctgttttttcacgcgctaacgcatgcgggtcgagatcggcctgattcagctcaataattgcctgagcaatacgccaggtggggcttccattaagcgcaatcatcgcctgaatatcgtactgaagaccgtagtgccctaatacttcgcgccacgctttacggtgcgtaggctccgtatccaggattgtgccatccatatcaaaaattaaacctgcataacgctcgtacatggtcttctcgcaagtcgaaaaatatgacgctactttagcgtaattgcttgattttgtcgctgatggcgaaggagaagaaaattcaggaaatggataaaggagttatttagaaatgagatatttttgaaggaaattttttggagaagatggtgcatccgggaggatgactcactgacgttcgcccttcgggccgttgctggcgcaacgttatccttcctggtgcctgcggttaataccgctatctcttcgataccttcattgctgaaggttacggagaatatggtgcatccgggaggattcgaacctccgaccgctcggttcgtagccgagtactctatccagctgagctacggatgcatcgggaaaacttattctactgctgatattgataccgctactaaagccatatcaattaagagatggtgcatccgggaggattactcgccttgcggctcgcccttcgggccgttgctaaagcaacgttatcatccctagtgcctgcggttaattccgctacctcttcgataccttcattgctgaagatttcggagaatatggtgcatccgggaggattcgaacctccgaccgctcggttcgtagccgagtactctatccagctgagctacggatgcatcgggaaatttattttactgctgatattgataccgctactaaagccatatcaagtaagagatggtgcatccgggaggattcgaacctccgaccgctcggttcgtagccgagtactctatccagctgagctacggatgcatcgggaaacttactttactgcagattttttgataccgctactaaagccgtatcaagtaagagatggtgcatccgggaggattactcgccttgcggctcgcccttcgggccgttgctaaagcaacgttatcctccctggtgcctgcggttattaccgccacctcttccataccttcatcgctgaaagtacgtagaatatggtgcatccgggaggattcgaacctccgaccgctcggttcgtagccgagtactctatccagctgagctacggatgcaaatggcggtgaggcggggattcgaaccccggatgcagcttttgaccgcatactcccttagcaggggagcgccttcagcctctcggccacctcaccacacgcctcttacgagtgcttcgaagaacttgtttatcgctcatcgtcgctgcgtggcgcacatattactttctgagacttataagtcaaacaatttttcctacacttttatcgtttgcacacttcacgttcaattagtctgtaaaaacgtcaaaaagagtgttttatcaacagaagaatggaggtctgacagatagtagtaatgcaaaaaaatggagacttaagttgaatgaacgggagtaaagcgaaaagactatagagtgaaggagaaattttgagggtgcgtctcaccgataaagatgagacgcggaaagattagtaactggactgctgggatttttcagcctggatacgctggtagatctcttcacggtgaacagaaacttccttcggggcatttacgccaatacgtacctggttgccctttacccctaaaactgtcacggtgacctcatccccaatcatgagggtctcaccaactcgacgagtcagaatcagcattctttgctccttgaaagattaaaagagtcgggtctctctgtatcccggcattatccatcatataacgccaaaaagtaagcaatgacaaacacattacatctaagcagtcatggcattacattctgttaaacctaagtttagccgatatacacaacttcaacctgactttatcgttgtcgatagcgttaatgcgaatgccgtgaagcgagtccacggcattgcctgacgcttatattattgcaatttcgcgctgacccagcctttcacactggctaacgctgcaggtaaggccgcagcatccgtaccaccggcttgcgccatgtcaggacgtccaccacccttgccgcccacctgctgagcgaccataccaatcagttcccctgctttcacacgatctgtgacgtccttagatacgcctgcaatcagagaaaccttaccttcgactaccgttgccagcacgataattgtgctccccagctgattttttaaatcgtcaaccatggtacgcaacattttcggctcaacaccgctaagctcgctaaccaacagcttaacaccattaacatcaattgccttactggaaagatttgcgctctcctgtgcggcagcttgttctttaagctgttgtaactctttttccagctgacgcgtacgttccagtacactgcgcactttatcagccagattattgctatcgcctttcagcagatgcgcgacttcgcttaagcgatcgctgtctgcatgaacggtggcgatagcaccttctccggttaccgcttcgatacgacgaacgcctgcagcagtaccgctttcagagatgatgcggaacagaccaatatcaccagtgcggctggcgtgagtaccgccacacaactcggtagagaaatcgcccatgctcagcacgcgtacgcgctcatcatacttctcgccgaacagcgccatcgcacctttcgctttcgccgcttcgagatccatgatgttggtttcgatcggcaaattgcgacgaatctgtgtgttcaccaggtcttcgaccgcacgaatctcttctggtttcatcgcttcgttgtgactgaagtcgaagcgcagcaccttgtcgttaaccagactacctttctggcttacatgagtacccagaacctggcgcagcgcagcgtgcatcaggtgcgttgcggagtgattcagacgaatacgggcgcgacgagcctcatcaacatcagcctgcaccgcgtcgcccactttcagagaacccgcagcaagtttaccgatgtgaccaatcgcctggccgtatttctgcgtatcttccaccgcaaaggagaagttagcgcctttcagttcgcctttatcgccaacctgaccgccggattccgcatagaatggcgtttgatccagcacgaccacagcttcctggcctgcattgatggcatcaaccgctttaccatcaacaaacagcgcagtcactttgccgttcagttccagatggtcatagcctttaaattcagatgcactgtcaacacggatcattgcgttgtaatcggcaccaaagccgctggcttcgcgcgcgcgacgacgctgctcttccattgcagcttcaaaaccagcttcgtcaactttgatgttgcgctcacgacaaacatcagccgtcaggtcaaccgggaagccataggtgtcgtacagacggaaagcagtttcaccatccagcgtatcaccagaaagttttgccagctcttcatccagcaacgccagaccgcgctccagagtacgagcaaactgctcttcttcagtcttcagcacctgctcaacctgcgcctgctggcgtttcaggtcttcacccgcagagcccataacgtcgatcagcggaccaaccagtttgtagaagaaggtttctttcgcgccgagcatattaccgtgacgcactgcgcgacgaatgatacgacgcagtacataaccacggttttcattggacggcattacgccatccgcgatcaggaacgcacaagaacgaatgtggtcagcgattacgcgcaggcttttattgctcagatcggttgcgccagtgactttcgctaccgcctggatcagcgtgcggaacaggtcgatgtcatagttagagttaacgtgttgcagcaccgcagcaatacgctccagacccataccggtatctacagacggcttcggcagcggttccatcgtgccatcggcctggcggttgaactgcatgaagacgatgttccagatctcaatgtagcggtcgccgtcttcttccgggcttcccggagggcccccccaaatgtggtcgccgtgatcgtagaagatttcggtgcacgggccgcacggaccagtgtcacccatctgccagaagttgtcagatgcgtatggcgcacctttgttatcgccgatgcgaataatacgttcgcgcgggatccctacttctttttcccagatttcgtaggcttcgtcgtcgctttcatagacggtaacccacagacgctctttcggcagggcaaaccatttttcgctggtcagcagttcccatgcaaactgaatggcatcgtgtttgaaatagtcgccgaagctgaagttgcccagcatttcgaagaaggtatggtgacgcgcggtgtaaccgacgttttccaggtcgttgtgtttaccacccgcacgcacgcagcgttgggaagtggtagcgcgggaataattacgcttgtcgagcccaaggaacacatccttgaactggttcatcccggcgttggtaaacaacaaagttgggtcgttatggggtaccagggagctgctggcaactacctgatgtcccttactatggaaaaagtcgagaaacgcctgacggatctcagcggtgctcttgctcataattatcctgaaatcaagctaacgaaatatcgccaccagctccagcgtgtcttaaccgccgggctggtaactgaaaagtgggaataagataagttttcttgactgggaagtaaaataccgtatgcgttcagtcggcaaaatttcgccaaatctcctggatatcttccatcagatagccacgatagagcagaaaacgctggatcttaactttttcactaaagacagttggcaaaggttcgccatattttcgcgtcgcctgatcgcgcgccagtgcgcaccagtcgatgtcacattcacgcatcgctttttctgtcgcttcgcgggaaatacctttctgattcagttcctggcgaatacgcgcaggtccataacctttgcggctacggctggcgataaagcgcgcaacaaatcggctgtcatcgagatagccatgttcatggcaccaggcaataacgcgctcgtaatcttctgccgtagcatcaatctcttctgggccatttttgcccataatcggtgccgcgagtttacgtcgcagttcttgctcactgtgatcgcgcaccgccagaatgcgtaccgcacgatccaacaggcgagcatatgccgggcgacgggatgtactttctgtcatggcatatccttacaacttaaaaaagcaaaagggccgcagatgcgacccttgtgtatcaaacaagacgattaaaaatcttcgttagtttctgctacgccttcgctatcatctacagagaaatccggcgtactgttcgggttgctcagcagcaactcacgtactttcttctcgatctctttcgcggtttccgggttatctttcagccaggcagtcgcattcgctttaccctgaccgatcttctcacctttgtagctgtaccacgcgcctgctttctcgatcagcttctcttttacgcccaggtcaaccagttcgccgtagaagttgataccttcgccgtagaggatctggaattcagcctgtttaaacggcgcagcgattttgttcttcaccactttcacgcgggtttcgctacccaccacgttttcgccctctttcaccgcgccgatacgacggatgtcgagacgaacagaggcgtagaatttcagcgcgttaccaccggtagtggtttccgggttaccgaacatcacaccaattttcatacggatctggttgatgaagatcagcagcgtgttggactgcttcaggttacccgccagcttacgcatcgcctggctcatcatacgtgccgcaaggcccatgtgagagtcgccgatttcgccttcgatttccgctttcggcgtcagtgccgccacggagtcaacgacgataacgtctactgcgccagaacgcgccagggcgtcacagatttccagtgcctgctcgccggtgtccggctgggagcacagcaggttgtcgatatcgacgcccagtttacgtgcgtagattgggtccagcgcgtgttcagcatcgataaacgcacaggttttaccttcacgctgcgctgcggcgatcacctgcagcgtcagcgtggttttaccggaagattccggtccgtagatttcgacgatacggcccatcggcagaccacctgccccaagcgcgatatccagactaaggctaccggtagagatggtttccacatccatggaacggtcttcacccaggcgcatgatggagcctttaccaaattgtttctcaatctggcccagtgctgccgccaacgctttctgtttgttttcgtcgatagccatttttactcctgtcatgccgggtaataccggatagtcaatatgttctgttgaagcaattatactgtatgctcatacagtatcaagtgttttgtagaaattgttgccacaaggtctgcaatgcatacgcagtagcctgacgacgcaccgcatcacggtcgccgctgaagcattcccgccgggtaatgccttcaccgcgggcagtggcaaaagcaaaccagacggtgccgacaggcttctcttcactgccgccatccggcccggcgataccactaatagacacggcataatcagcacgagccgctttcagtgcgcctatcgccatttccaccacgacgggttcactcaccgcgccatgctgcgccagcgtctcttcgcgtacgccgatcatctgcgctttggcttcgttactgtaggtgacaaatccgcgttcaaaccaggcggagctaccggcaatatcggtaatcactttcgctacccaaccaccggtacaagactcggcagttgttacggttgcgccacgggctttcagcgcctgcccaacctgttcacttaactgcatcagttcactgtcagtcatcacaacctctgtcagtcaaaaatttatgccggacaagatagcactttcgtcaggaagatggtgttggcgttgcaattttacgaggaggattcagaaaaaagctgattagccagagggaagctcacgcccccctcttgtaaatagttactgtactcgcgccagcgccacggcttgtcctaactgccagaccgccattgcgtaatgggtgctgtggttgtaacgggtgatggtgtagaagttcggcagaccgtaccagtactggtagccggtgccaacatccagacgcagcaggctggcttgttgatggttgcccagcggctgctgtggcgttaaacctgcggcggcaagctggctaatgctgtacttagttttgaagccatttggcaagcctggagcctgaccgtttgccattaccgcgacctgatcgcctttcacccagccgtgcgctttgaaatagttcgccacgctaccgatcgcatcaaccggatcccacaggttgatatgcccgtcgccgctgaaatctaccgcatattgtttgtaagagctcggcataaactgtccgtagcccatcgccccggcaaaggaacctttcagattgagcggatcgtcctgctcgtcgcgcgccatcaacaggaaggtttccagctcgccagagaaatactccgcgcggcgtgggtagttaaaactcagcgttgccagcgcatcgaggatgcgagttttccccatcacgcgcccccagcgggtttcaacgccgataatcccgacgataatttccggcggtactccatacacctgccacgcgcgattcaacgcatcttcatactgattccagaaaaccacaccgttctgcacgttgtccggcgtaataaattttttgcgataacggagccatgcgccgttcggaccacttggcggtttcacgcttgtggttggtgcctggttatccatcagccgcagtacgctatccagacgcttcgcctgggagagaatttcctgcaactgctgacgatcgaaaccgtgtttgttcaccattttgtcgatgaactgctgggcattcgggttattagcgaaatcgccgcccatctgcatcacattgtgctgcggctcaagcaggaagccgccagacggcgttccggtggtcgtatcagtctcagtaggttttggcttgctgctacaggcggcaagcaacacaaaaaggggaagcaatgttacataacgacgcttgaacatgaggggtccatttaacagattcaaccaggggcaagtatggtaaagcatcacgccccgcacaaggaagcggtagtcactgcccgatacggactttacataactcaactcattcccctcgctatccttttattcaaactttcaaattaaaatatttatctttcattttgcgatcaaaataacacttttaaatctttcaatctgattagattaggttgccgtttggtaataaaacaataaatcctgaaggagagaacaatgatagaaaccattactcatggtgcagagtggtttatcgggctgttccaaaagggcggagaggtgtttaccgggatggtgaccggcattcttccgctgttgattagcctgctggttatcatgaacgcactgattaattttatcggtcagcatcgtattgaacgttttgctcaacgttgcgccggtaaccctgtttcccgttacctactgttaccgtgcattggcacgtttgtcttttgcaatccgatgaccctaagcctgggtcgctttatgccggaaaagtacaaacccagctactacgcggcggcctcttatagctgccacagtatgaatggcctcttcccccatatcaaccctggcgaactgtttgtttatcttggcattgccagcggtctgacaacgctgaacctgccacttggcccactggcggtgagttatctgctggttggtctggtcaccaatttcttccgcggctgggtgaccgatctgaccaccgccatttttgagaaaaagatgggcattcaacttgaacaaaaagttcacctggcaggagcaacaagttgaaataacacctggcaggagcaacatcatgacgcatattcggatcgaaaaaggaacgggtggctggggcggcccgcttgagctgaaagccacgccgggaaaaaaaatcgtctatatcaccgccggtacccggcctgcgattgttgacaaactggcacagcttactggctggcaggctattgacggatttaaagaaggtgaacccgcggaggtggaaattggtgtcgcggtaatcgactgtggcggcacattacgctgcggcatctatccgaaacgacgtattcccaccattaatatccacagcacgggcaagtccggtccgctggcgcagtacattgtggaagatatttatgtctctggcgtaaaagaagaaaacatcactgtagtaggtgatgcgacaccacaaccctcttccgtgggccgtgactatgacaccagtaagaaaatcaccgaacaaagcgatggtttactggcgaaggtgggaatgggcatggggtccaccgttgcggtgctgtttcaatctggtcgtgacaccatcgacactgtattaaaaaccattctgccgtttatggcattcgtcagcgcgctcattggcatcattatggcttctggccttggtgactggattgcccacggtcttgctccgctggcgagccatccactgggtctggtcatgctggcgctcatctgttccttcccactgcttagtcctttcctcggcccaggcgcagttatcgcacaggttatcggcgtattgattggcgtgcagattggtctcggcaatattccgccgcatctggctttaccggcactgtttgccatcaacgcgcaggcggcctgcgacttcatcccggtcggtttgagcctggcggaagcccgtcaggacacggttcgcgtcggtgtcccttctgtactggtgagccgctttttaaccggcgcgccgactgtactgatcgcctggtttgtctccggttttatctatcaataaaggctgaaacatgaccgttatttatcagaccaccatcacccgtatcggcgcgagtgccattgacgccctcagtgaccagatgctcatcacctttcgtgaaggcgcgcctgcggacctcgaagagtattgcttcattcattgccacggcgagttgaaaggtgcactccatcccggtttgcaatttagtctcgggcagcatcgctatccggtgaccgctgttggcagcgtggcggaagacaaccttcgcgaactgggtcatgtcaccctgcgcttcgatggtttaaacgaagcggaatttccgggcactgtccatgtggcaggccctgtccccgacgatatcgcgccgggaagcgttttgaagtttgaatctgttaaggagtaaaaaatgaatcaggttgccgttgtcatcggtggtgggcaaaccttaggcgcgttcctgtgccacggtctggctgccgaggggtatcgcgtcgcggttgtcgatattcagagcgacaaagccgcaaatgtggcacaagaaattaacgccgaatatggtgaaagtatggcgtacggttttggtgctgacgccactagcgagcaaagcgttctggcgctctctcgtggggtagatgaaatctttggtcgcgtggatttgctggtctacagcgccggaatagcaaaagcagcctttatcagcgacttccagctcggcgattttgaccgtagcctacaggtgaatctggtgggttatttcctgtgtgcgcgtgaatttagccgtttgatgatccgcgacgggattcaggggcgcattattcagatcaacagcaaatccggcaaagtgggcagcaaacacaactctggctacagcgcagcgaaatttggtggcgtcgggctgactcaaagtctggcgctggatctggcggagtacggcattacggtgcatagtctgatgctcggtaacctgctgaaaagcccgatgttccagagtctgttgccacaatacgcgaccaagctgggtatcaaaccggatcaagtcgagcagtattacatcgacaaagtaccgctcaaacgcggctgcgattatcaagatgtgctgaatatgctgctgttctacgccagtcctaaggcgagctactgcaccggacagagcatcaatgtcaccggcggtcaggtgatgttctgatcaacagcggagatccattaaggatctccgtgagactatagaatgcctgatgcgctacgctcatcaggcatacaggacttccgccactacattaaggaaaagttatggtatccgcactcatcaccgtcgccgttatcgcctggtgtgcgcaactggccttaggcggctggcaaatttctcgttttaaccgtgccttcgacacactatgccagcaagggcgggttggcgtgggccgttccagcgggcgctttaaaccgcgggtcgtggtcgccatcgcgctggacgatcagcagcgcatcgtcgacaccttgtttatgaaaggactgaccgtcttcgcccgaccgcaaaaaattcccgcaattaccggtatgcatgcgggtgatttacagcccgatgtgatctttccccatgatccactaagtcagaatgctctaagtttggcgcttaaactgaaacgtggataatttcgttgtgaatgttacttgcttgcgaagttatcattttgaaacctaaatcaggtaatcacgcccatgaaacctcgtcagcgtcaggccgccattctggagtatctgcaaaagcagggtaaatgcagcgttgaagaattggcgcaatactttgacaccacaggcacaaccattcgcaaagatctggtcattctggaacatgccggaaccgtcattcgtacttatggcggagtggtgttgaataaagaggaatccgatccgcctatcgatcataaaacactcatcaacacccacaagaaagagctgattgcagaagctgccgttagttttatccatgatggcgatagcatcattcttgatgctggcagtaccgttttgcagatggttcccctgctcagccgctttaataacatcacggtgatgaccaacagcctgcatatcgtcaatgcgctatccgaactggataacgaacaaactatcctgatgccaggcggaacgtttcgcaaaaaaagcgccagttttcacgggcaactggcagagaatgccttcgagcatttcaccttcgataaattgtttatgggcaccgacggcatcgatctcaatgcgggcgtaaccacctttaacgaggtttataccgtcagtaaggcaatgtgcaatgccgcgcgcgaagtgattttgatggcggacagtagtaagtttggccgtaaaagccccaacgtagtttgcagtcttgaaagcgtcgataagctgattaccgacgcaggtatcgatccggcgtttcgtcaggcgctggaagagaaagggatcgatgtgatcataaccggagagagcaatgagtgaagcactactgaacgcgggacgtcagacgttaatgctggagttgcaggaagcaagccgtttaccggaacgtctgggcgatgattttgttcgcgccgccaatatcatcctgcactgtgaaggcaaagtggtggttagcggaattggcaaaagcggccacattggtaagaaaatcgccgcaacgcttgccagtaccggcactccggctttttttgtccatccggcagaagcgctgcacggcgatctggggatgatcgaaagccgcgatgtgatgctgtttatctcttactccggtggcgcgaaggaactggatctgattattccgcgtctggaagataaatctatcgcgctgctggcgatgaccggcaaaccgacgagtccgctgggcctggcggcaaaagcggtgctggatatctccgtagaacgcgaagcctgcccgatgcaccttgcgccgacctccagcaccgtcaataccctgatgatgggtgacgcgctggcgatggcggtcatgcaggcgcgcggatttaatgaagaagattttgcccgctcccacccagccggggcactgggcgctcgcttgctgaataaagtgcatcatctgatgcgccgtgacgatgccatcccacaggtggcgttaaccgccagcgtgatggatgcgatgctggaactcagccgcaccggtctggggctggtggcggtatgtgacgctcaacaacaggtacaaggcgtctttaccgacggcgatttacgtcgctggctggttggcggcggcgcactcaccacgccagtcaatgaagcgatgacggtcggcggcaccacgttgcaaagccaaagtcgcgccatcgacgccaaagagatcctgatgaagcgcaaaatcactgccgcaccggtggtggatgaaaacggcaaactcaccggcgcaataaacctgcaggatttctatcaggccgggattatttaatccttcaatcccagacgtttcgccagccgatgcaggttggcgacgtcggtttccagcatccgcgcgcaggcagcccagttgtgatgattttgtgccagtgcctgacgaatagtttcacgctggaacgcttctgtcgcttcacgcaggttttgcttaacaacgggcaccgccgccacttctggcgtcggcaacgtcacctcaggaaaagcaaaatgttgcgcctcaagaatcacttcatcgccgctgcgggtggctctcgccagaactaccgcccgatgaatagcatgttccagttcgcgcacgtttcccggaaaactgtagtgttgcagtaaatttcgcgctccggcacttaataccacgcgggagagcccctgccgcaaacgacactgctcgcagaaataccccgccagcagaatgacatcatcgccccgctcacgcagcggcggcacgctaagtggaaacacgctcaggcgatgaaacaaatcggcgcggaatcgccctgccagcacctcttcgcgtaaatcgcggttagtcgccgccagcacgcgcacatcgacccgcaaacaacggtcatcgccaacgcgctgaatatcgccatactgcaacaccctcagcagcttggcctgcaatgccaagctcaactcgccgatctcatccagaaacagcgtgccgttatccgccatttcaaacttcccgctgcgattactgatagcgccagtaaacgctcctttcacatgcccgaacaactcactttccgccacactttccggcagtgcagcacagttgagatagaccagcggattcaccgcccgtgggctggcttcatgaatcgctttcgccaccagctccttaccggttccagtctcaccgctgatcaggacgttgagatcggacgccgccacaatctcaatctcttttttcagttgcgtcatgccaggggacaagccaatcatctgcgtctgtttcaccgcttcaaacggcgtggcatcgcctggcagcatattctggctttccagttgttcaatcagcaacgcattgcttaacgctcccgccgccagcgcagcaatcagccgtagctcttcgtcgctgaaaacatcgaactgatcgggctgcatcccgtcgagcgtcagtgcgccgatcaggttttgcccggcaaacaatggcagaccaacgcaggcgtgaaccttcagactctcctgcccaggaatcaaaccgtcatagggatcgggcaattcgctgtctgcgggaaagcgcaccacatccccggcgcgggcaatcgcttccagccgtggatgcccttccagcgcaaagcgtctaccgagtacatcctttgccagaccgtcgatggcaagcggaataaactgccggctatcgtaacgtagcaacgcagacgcatcgcactccagcacctgacgtagcgtggtgatcaggcgctgaaaacgatcctggtgaccaatcccacgctgcaattcgatggcgatattcgccagcacatcaacggaaaaactcatctttgcctcactgtcaatttgactatagatattgtcatatcgaccatttgattgatagtcattttgactactcattaatgggcataattttatttatagagtaaaaacaatcagataaaaaactggcacgcaatctgcaattagcaagacatctttttagaacacgctgaataaattgaggttgctatgtctattgtggtgaaaaataacattcattgggttggtcaacgtgactgggaagtgcgtgattttcacggcacggaatataaaacgctgcgcggcagcagctacaatagctacctcatccgcgaagaaaaaaacgtgctgatcgacaccgtcgaccataaattcagccgcgaatttgtgcagaacctgcgtaatgaaatcgatctggcggatatcgattacatcgtgattaaccatgcagaagaggaccacgctggggcgctgaccgaactgatggcacaaattcccgatacgccgatctactgtacagccaacgctatcgacagcataaatggtcatcaccatcatccggagtggaattttaatgtggtgaaaactggcgacacgctggatatcggcaacggcaaacagctcatttttgtcgaaacaccaatgctgcactggccggacagcatgatgacttacctgacaggcgacgcggtgctgttcagtaacgatgctttcggtcaacactactgcgacgagcatctgttcaacgatgaagtggatcagacggagcttttcgagcagtgccagcgttactacgccaatatcctgacgccgttcagccgcctggtaacaccgaaaattaccgagatcctgggctttaacttaccagtcgatatgatagccacttcccacggcgtggtatggcgcgataacccgacgcaaattgtcgagctgtacctgaaatgggcggctgattatcaggaagacagaatcaccattttctacgacaccatgagcaataacacccgcatgatggctgacgctatcgcccaggggattgcggaaaccgacccacgcgtggcggtgaaaattttcaacgtcgcccgaagcgataaaaacgaaatcctgactaatgtcttccgcagtaaaggcgtgctggtcggcactagcacgatgaataacgtgatgatgccgaaaatcgccgggctggtggaggagatgactggtttacgcttccgtaacaaacgcgccagtgctttcggctctcacggctggagcggcggtgcggtggatcgtctttccacgcgcctgcaggatgcgggtttcgaaatgagccttagcctgaaagcgaaatggcgaccagaccaggacgctctgaagttatgccgtgaacacggtcgcgaaatcgcccgtcagtgggcgctcgcgccgctgccgcagagcacggtgaatacggtagttaaagaagaaacctctgccaccacgacggctgacctcggcccacggatgcagtgcagcgtctgccagtggatttacgatccggcaaaaggcgagccaatgcaggacgttgcgccaggaacgccgtggagtgaagtcccggataacttcctctgcccggaatgctccctcggcaaagacgtctttgaagaactggcaagcgaggcaaaatgagtaacggcattgtgatcatcggtagcggcttcgccgcccgccaactggtgaaaaatattcgcaaacaggacgccactattccattaaccctgattgccgccgacagcatggatgagtacaacaaacctgacctcagccatgttatcagtcaggggcaacgtgccgatgaccttacccgccagacggcgggtgaatttgccgagcagtttaatctgcacctgtttccacaaacctgggtgacggatatcgatgccgaagcccgtgtggtgaaaagccagaataatcagtggcaatacgacaagctagtactggcaaccggtgccagtgcctttgtcccgcctgtgcctgggcgtgagttaatgctgacgttaaatagtcagcaagagtatcgcgcctgtgaaacgcaactgcgggatgcccgacgcgtgttgattgttggcggtggtttgattggtagcgaactggcgatggatttttgtcgtgcaggcaaagcggtcacgctaatcgacaacgctgccagtattctggcgagcttaatgccaccggaagtaagcagccgcttgcagcatcggttgacggagatgggcgttcatctgctgttgaaatctcagttacaggggctggaaaaaacggattctggcattcaggcaacgctggaccgccagcgcaatatcgaagtggatgcggtaattgccgccaccggactgcgcccggaaaccgccctggcacgacgcgccgggctgacgattaatcgcggcgtttgcgtcgatagttatctgcaaaccagtaataccgatatttacgcgctgggcgattgcgcggaaattaacggtcaggtattgccgttcctccagccgattcaacttagcgcgatggtgctggcaaaaaatcttctcggcaataacacgccgctgaaactcccggcgatgctggtgaaaatcaaaacgccggaattaccgctgcatctggcaggcgaaacccagcgtcaggatttacgctggcaaattaataccgaacgccagggaatggtggcgcgcggcgttgacgatgctgaccagcttcgcgcctttgtggtcagtgaggatcggatgaaagaggcatttggattgttgaaaacattgccgatgtaagtgggctactgtgcctaaaatgtcggatgcgacgctggcgcgtcttatccgacctacggggacgcatgtgtaggccggataaggcgtttacgccgcatccggcaatggtgtccaaatgcaacacgttttatccgttctggacttcacccgctaaccaacgcgccgcagcaataaccccctgccccagagacaaaccgccatcacccgccggtaaactctgtggaaagagcaatgtgaaatcagcgagataatgcgccagacgtgcacgcagcaaacggttatgaataaccccgccgctaaataccagcgtagtgataccacgcatcgtggcctgctcacgcatcaacgcggcaaaaccctgcgccagcgtatcatgaaacgcccacgcgcgttgattaaccggtgcctgccagttcagccactgctgccagaaagtggcgagatccagttgattgtccacccgcggcattgtcaccggatgcgtcactccgtggcaactggctgcgagcgcctccagagcacaagccgcttcaccttcataacttaacgtggctggcgcacagcccagtgccgccgccactgcatcgaaaaaacgcccacagctactcgccagcggcgcgttaattccacgctcaatggcccgcgccagcacgctccagttttgctgttgcacacttgctgtttcagagtaattctgccactccggcacaaagcgcaggcactgcgccagcaggtttcgccacggctgcttcgctgccaaatcgccacccggaagcgccactgcaggcaagccgcccaggtgctcacattcgcgatagttcacccgcaggcactcgccgccccacaaagcgccgttctcccccataccgataccgtcgagcgtcaaagcaatgacatcaccgccatccagcggccactgatgctctgccagacacgccgctgcatgggcatgatgatgcagtaccgtttgcgtcggcagattcatttcacgcgcccactggctggagacatagcccggatgcgcgtcatgcacaacgtattgcggggtaaaatcgtagatgttttgcatcaggcgtaacgcttcgcgccactgcatctggatgccatcgtcacttaaatcgcccagatgctgactcaacaccgcttgttcaccgcgcaccaggcagaaggtatttttcagatccgcgccgagacacagcacaggcggaacatttttaaagcccggaggcaaagccagcgcatccggcacatacccccggctacggcgcagcatttcgccgctttcgcgcaccacgctatcatccatccgctgcacgatgtcgcggttatgtatcaagaatccgtcggcaatgccctgcaaatccgccagcgcctgttcgttgctgatagctggtggtttaccgctcaggttgccggaggtcatcaccagcgggcattgcagttcctgtaacagcaaatgctggagcgggttcgcaggcaacattaccccgacttcgttaaggtcaggggcgatatcatcacaaagctcaggaacgtattttttatccaccagcacaatcggcgcggcgggcgtggtaagcaactggcgcgcagcgtctggtaaaccgtcagccactggcaacatgaccgccagcggtttcgccgggcgatgtttgcgcgcccgaagtgtcgccaccgcgttactgttacgtgcatcgcaggcaagatgaaatccgccaatccctttgatggcgacaattttgcccatttttaactgtgcgatagctgcctgtaatgccgcctcttgttccgcatgttcaccatgacttacccattcaagatgcgggccacactccgggcaggccaccggctgggcgtggaagcgacgatcgagcgggtcacggtactctttgtcacaggccggacatagcggaaacgccgccatcacggtaaacgggcggtcgtaaggcatggcgcgaataatggtgaaacgcgggccgcagtgggtacagttgataaacggataacgataacgccgttcgcctggggtattcatttcggcaaggcaagcagggcaagtagcggcatcgggaacaatttgcgtattcatggtgccgcctgtgctctggcgtatagtgaactcggtgggcagttgactccagataaacggctcacgctcgacgctatcaatacgcgccagcggcgggcagtgctgatacaattgaacaagaaacgtttccgggtcttcccgcagccggacttctacgccatcgccgtcattacagacatcgccgtgaagatttaattgctgtgccagctgccagacaaacggacgaaaaccgacgccctgcactttgccacgaatacgcagttggacaccgcaagatgtgttttttgccattgagttattcccgccatcatgaattgcgtaacccgccctgccggacacgacagcgtcgcatccggcagtcacaggtcggcgataccgcccgctccgtattctacgaatatttccgggaattcctttgatgccagaacagttctgtaagatttttagaacatcagcgccgtacggcggcgtttttctgcgctcagttgttcaagtttattacgatcgacacaaatcagcgcatgagtcgggcaagccgccatacacgccgggccgtcttcacgatggttgcacaggtcgcatttattggcttcggctttgtcagcccgtacattcagacccgcgccgctgttgcggatcaccggacgtaccaccacttccatcgcaccatacgggcaagccacaacgcaggttttgcaaccaatgcaacgttcctgcatcacatgaacaaaccctttatcacggctgatagcaccattcgggcagacgttagcgcacggtgcatcttcacactgacggcaaactgtcgccgtggaaatgttcacacctttaatgacatggatacgcggtaaaaaagtttccggggtcaggcttgcacagtcctgattttcctgatgagaaaccacgcacgctacttcacaggtacggcaaccaatacatttactcgcgtcagcaatgatgaaacggttcatcaaattctccagcaatgacagttaatgcgccgatacattcacaaatcatgccagtttttaatttactgttatttaaggaaattaatttctgtaatgcaggaaaaacgatgtcatcgacactagtgacgatgacatgtgatgacaatgtttatcggctaggagcaatgagactgtcgcggcggatcagttttccgctgaaggttttcggcggactgaaatccccgccatcgagcataaaaatcagccgtccaataatttcctgaatcatctcagtcaccggaatttttacgctggagagcgccggaacggtgtagggggcaatagcgatatcatcgaatccgataacactcacctgctctggcaccgctacgccgcgctcgtgtaacgctttcatcgcacctatcgccatatcgtcgttactggcaactaacgcgctaaatttagccccacgttcgagcaacatttctaccccttcggccccgctggcaggcgtccatttaccgttagcgataagtttttcattgagcgcaataccatgctgcgccagcgcgtctttatacccggcaagacgttcaatgttggtgggggaatccatgctgccggtaaggaaagcaatctcctgatgcccggcgtttatcaactctgccacggcgttaaaactggtctgtttatgatcgcaccagacgctatggctgctgtttttgcgcaggcggcgattaagcaccattatcggctgactgtgcgcgtcaatgatgtcatcgatctcatccacgcttaaaaaacgcgggtaaatcatgatcgcgtcgcagcgcagatccagcagatactgaatcgcctggcgctcttcttctgcgctgtgtttaccatctgccaatagcaactgccgccctttctcttccgccattcgcgcggcatgaaagagtaattcactaaaataaatgccgtggtaaagcgtgttggtcactaccagccccagcgtctgagtactcttcgcgctcagattgcgcgccagcaagtttggacggtaaccgctctcttctaccgcctgaaacacgcgatctttagtctcctggctgacgtagccattaccactaagcacgcgggaaacggtcgctttactaaccccggcgcgcttcgccacttccagcatcgtcgtcatcattttcatccctttacacgcaatcaacgcagtgtactgcaccgtttgccgattgtccttgcacaatcggcgggaaaaatattcaggtgaccggtttcacaaatataaaaaatgaacaattcactctcttgcttatttagtgacaactattcatgattttgtgaaaccggtttcttaattccgtttcagcatcggcatttttccgtcacgtcgactgataacaactacatctaccctactgataacaggataaaatccgatggccaaaaattatgcggcgctggcacgcagcgtgatagcggcactgggcggcgttgataacatcagcgcggtcacgcactgtatgacgcggttgcgctttgttatcaaagatgatgcacttatcgacagcccgacgttaaaaaccatccccggcgtgctcggcgtggtacgtagtgacaaccagtgtcaggtgattatcggcaataccgttagtcaagcctttcaggaagtcgtcagcctgctgccgggagatatgcagcccgcacagcccgtgggtaaacccaaactcacgctacgtcgcattggtgcggggatcctcgatgcgctgatcggcaccatgagtccgctgatcccggcgattatcggcggaagcatggtcaaactgctggcaatgatcctcgagatgagcggcgtgctgacaaaaggaagcccgaccttaaccattctgaatgtgattggtgacggtgctttcttcttcctgccgctgatggtcgcggcatctgccgccatcaaatttaaaaccaatatgagcctggcgattgccatcgcgggtgtgctggtacatccgagttttattgaactgatggcgaaagcggcccagggtgaacatgtcgaatttgccctgattccggtcaccgcggtgaaatacacctacacggtgatcccggcgctggtgatgacctggtgcctgagttatatcgaacgctgggtggacagcattacaccggcggtgaccaaaaacttcctcaaaccaatgctgattgtgttgattgccgcaccgctggcaatcctgctgattggcccgattggtatctggatcggtagcgccattagcgcgctggtttacaccattcatggttatctgggctggcttagtgtcgccattatgggcgcgctgtggcctctgctggtaatgaccgggatgcaccgcgtctttacgccaaccatcattcagaccattgccgaaaccggcaaagaagggatggtcatgccgagtgagatcggcgctaacctgagcctgggcggtagtagtctggcagtggcgtggaaaacgaaaaacccggaactgcgtcagacggcgctggctgcggcggcaagtgccattatggcggggatttccgaaccggcgttatatggcgtggcgatccgcctgaaacgtccgcttatcgccagtcttatcagcggttttatttgcggcgcggttgccggtatggcggggcttgccagccacagtatggcagcgccggggctatttaccagcgtgcagttcttcgatccggcgaatccaatgagcatcgtctgggtgttcgcggtcatggcgctggcggtggtgctgagctttatcctcacactgttgctcggctttgaggatattcctgttgaggaagcggctgcccaggcgcgaaagtatcagagcgtacaaccgaccgtcgccaaagaagtaagtcttaattgaggatgaaaatgagtgtatttccagaaagttttttatggggcggcgcgcttgccgccaaccagtctgaaggtgcgttccgtgaaggtgacaaaggtctgaccactgtcgatatgatcccacacggcgagcatcgaatggcggtgaaactggggctggaaaaacgttttcagttgcgagatgacgagttttatcccagccatgaggcgacggatttttatcatcgttataaagaagatatcgccctgatggcagagatgggattcaaggttttccgtaccagtattgcctggagccgtctctttccgcagggcgatgaaatcacgcccaatcagcagggcattgctttttatcgttctgtctttgaagagtgtaaaaagtacggtatcgaaccgctggtcacgttgtgccacttcgatgtgccgatgcatctggtcaccgaatatggctcctggcgtaaccgcaagctggtggagtttttcagccgctacgccagaacctgctttgaagcatttgatggtctggtgaaatactggctaaccttcaatgaaatcaacattatgttgcatagcccgttctccggcgcgggtctggtgtttgaagaaggtgaaaatcaggatcaggtgaaatatcaggccgcgcatcaccagctggttgccagtgcgctagccaccaaaatcgcccatgaggttaacccgcaaaatcaggtgggctgtatgctggcgggcggtaacttctacccttacagttgcaagccggaagatgtctgggcggcgctggagaaagaccgggaaaacctgttttttatcgatgtgcaggcgcggggcacgtatccggcttactctgcccgcgtattccgcgaaaaaggggtaaccatcaacaaagcaccgggcgatgatgaaatcctgaaaaacaccgtcgattttgtctctttcagctattacgccagccgctgcgccagcgcggagatgaacgccaacaacagcagtgcggcgaacgtggtgaaaagcctgcgtaatccgtatctacaggtgagcgactggggctggggaattgatccactcggtctgcgtatcaccatgaatatgatgtacgatcgttatcagaagccgctgtttctggtggaaaacggcctgggcgcaaaagatgaatttgctgccaatggcgagattaacgacgactatcgcatcagctacttacgcgaacatatccgcgcaatgggcgaagcgattgcagacggcattccgctgatgggctacaccacatggggctgtattgatttagtttccgcctctacgggtgaaatgagcaaacgctacggctttgtctttgttgaccgtgacgacgcaggcaacggtacgctgacgcgcacgcgtaagaaaagtttctggtggtataaaaaagtgattgccagtaatggggaagatttagagtaagtaacagtgccggatgcggcgtgaacgccttatccggcctacatgtcgcacgaaccatgaaggcccgataagcgcagcgcatcgggcaatttagcatttggcatcagagctggttcaccccatcaagaacatccctgtcctgattccttaatgaaaaattactcttcttccaccgctaactgcgcgaagccgccatttccttcccagccttccagtcgttgataaacggtttctaccgcatctttaatcggctgggtcatcgggtagtaaaagccgacgatatccggctgaatgccgaggaaaatcacttcgccaatatcttctttcaactggtcgataaggtaattcaacggcatgttatgggtagtcatcataaacatctcggcgatatcatccgggtcgatgatgcggatctcgccggggtttagccccatatccgtggcgtcgacaatcagcagtcgtgtcgggcgcagttcacggatagcgacgatgtcgttttccggtgcgctaccgccgtcaatcaccacccagttacctttcggcgcggcggcgcacttttccgccagcagcggacctgcgccatcatcgcccatcatgctattgccaacacagagtaaaacgtcagtcacgcagtctcctcaccatcaaatagatggcgttttcctgatgaatatcatgcagcatacttaacagcattgtactccattcctgctgctggctagtttgcgctgcccgggctttatcgaatgcgttggccagcatcggcacatggttaatgtcgatgacgatctcaccatatttcggcacgccttccattttgcggcgggcttcactgcctgcctccagagtggcaatccatgccagatattcatcccacgggcaggtgagcgccgcttccaggcaatcgataaccccaaggtggtgaccaatcgccaggctgtaatagaccacctgctgcgcctcggcgggcgtggcatcgttctcatcaataaatttatggctcagttgactgaacaccaccttttcactcatcggatacgcgcctcttcaacaacatgattcagatggctgacaatctcgttcagacgcggatcgttttccgcttccagccagcgtgcaacctgttcttcgccctgccctaactgtgtaaggtaatcatcggcaatctgacgaccgtaacgataacccgccaggcgacgtgcttcgcgatccactttcacgcgcagcggctgcaccatatcaccatgcaggatctccgccggttgttcatccagttcacccggcccacgggcgtgaattttctgctccagcaggccgagcgccattgcaaagccgtacagcgtggcggcaggcgttggcgggcagccagggatataaacatccacagggacaattttatccgtaccgccccacacgcagtagagatcgtggaagatcccgccactgttaccgcaggcaccgtaggagatacaaattttcgggtccggcgcggactgccacgcacgcagcgcaggggatcgcattgcacgggtgaccgcgccggtaaacagtaaaatatccgcatgacgcggactaggaacgactttaatgccgaagcgttctgcatcaaacagcgggctaagcgtggcgaaaatttcgatttcgcaaccgttgcagccgccgcagtccacgcggtaaacataggcagaacgtttgatttttttcagtaagctcgccttcatgctggcgatggattcatccaccgtcatggggaccggaatgccgttggcgtcacgggggcctaataaattgctcatcagatggcctctttcatatggcgagtcagttcaatacggtcggacggcaccaggcatttctggcgcttacattccgggcaagtctcaaagctttcgcggtggttttccgcgcggctgtcgccgttgtgcttaagcagcgcaatggcgtagtcgatctctttctggacggcgaaaggacgattgcagacgcggcagttgcacagcgcgaagcgggactgttgcaggaagtcttctttcttccacaccgccagttcgtactcttggctcagtttgatcgccgccgtcgggcagacttcttcgcagcgtccacagaagatgcagtgcccaagattaaactcccaggcaagctctcctgtggcgaggtcagtttcaaccgttaaggcgttactcgggcaggcattgacgcaggccgcgcagccgatgcactgctgcgggttctgctctggcttaccacggaagtttttatcaaccgcaatcggctccagcggataagagctggtcgccgtgccggttttgatgacttttttgataaaggtaaacatggcgattccttatttcagcgggctgtttttacgctcaatgctgtaacgctcgagttctttgtacggcaccactttgctcttcttcttacgcacatcgaccacggtcatgcggtcggtacaggagtagcaagggtcgaggctaccgataatcagcggcgcatcggaaacggtgttgccgcgcagcatgtagcgcagggtcggccagttcgcgtaggtcgcggcacggcagcgccagcggtacagcttctggttgtcgccggtcatgctccagtggatatcatcgccgcgcggcgcttcggcaaagcccagcgcaaagcggtgcggaatgtaggtaaagccttccaccatcagtgggccacccggcaggttatccagaccgtagtcgatcatgttcagcgcggtatagacttcgttgatacgcactttcagacgggaaataacgtcgcagccctgctcgctgtggacttccattggcagcaggccatagccgacaaacgggtgatcggcgcgggtatcacgggcgtgaccgctggcacggaccatcgggccgacgttactgaagtcgcgagcgatttccgggtccagacgaccaatgccgacagtgcgctgttccatgttcggagtgctcagcagcacatccaccagctcctgcacttcacgacgcatctgttgtgccagctggcgggtctggatcatgtcgtctttcagcagatcgcgacgaatcccgccgatcaagttcaggccgtaggttttacgcgcaccggtaaggatctctgccattttcatggaggtttcacgcacgcggaagaactgcataaagccggagtcgaagccggtaaagtgacaggccaggccaaggttgagcagatggctgtgcaagcgttctacctccagcagaatggcgcggatcatctgcgcacgttctggcacctgaatacccatcgcgttttccacgctcgtggtgtaggcggtgctgtgggcaaagccgcagatcccgcacacacggtcagagaggaaggtcacttcgttataacccatacgggtttccgccagtttttccatgccgcgatggacgtagaacagacggtagtcggcgtcgataatgttttcgccatcgacgaacagacggaagtggcccggttcatcagaagtgacgtgcagcggaccaatcggcacgacgttgtttttcttgtcgcccagttcgttgatgaactcgtaggtttcagcatcggtggtcggtgccggacgctgacgataatccatgctgtctttacgcagcggataaagttcatccggccagtcatccggcagcaccagacgacgttcatccggcagaccaaccggaatcaaaccgtacatatcgcgcacttcacgctcgccccacaccgccgccggaacgcgcggcgtcacggacggatattccggtttgttggcgtcaacttcgacgcgaaccgtaatccaacacttagtgcccttctccatgctcagcacgtagtaaacggcgtaatgaccattcagtttgcgttcgtcgttaccaaacagcacgctcagccagccaccctgtttgtagtaaagaaactccaccacttccggcaggtagttcacctttacggtgacagtcagctgatctttggtctgccaggcgtggtccagcacgacgcccggaaatgcctcattcagcgcggcgagataatgttgacctaatttttcttcagacatgctcaaactctctttaatcacgccgccagcaaggagacgaacgctaaaaatgcaaagccaaacccagcccaggtaatgcgcggagtaatatcaagacgcagacgggccatgctgttttcgaacagcgcgataaccaggacgccgaccaccagttttacgatggcaatcaccagcgccagcagcagtccaccggcggtgaaggtttccatttgtccccacggaataaacaccccgacgaacatctgcaacaccaccagctgtttcaggctgataccccatttcatgacgccaaagccgctgccgctgtattcagagagcgggccttcctgcagctcctgctcggcttccgccaggtcgaacggcagtttgcccatttcgataaaggtggcgaacgcacaggcacaaagcgccagtaccagcgggatgctctggctcagcggccagtgataaacggtgtcggtgatgttgctgatgttggtggaaccggcaacctgtgcggcaacccacagaccaagcagcagcatcggttcgaccagcacgccaagcatcgcttcacggctcgcgccgatagcggtaaacgggctaccggtatccagaccagaaatggcaaagaagaaacgcgcgatggcaaagagatacagtaaggtgatcaaatcacccagttgcggcagcggagaaccgacggtcaccaccggcagcgcagtagcgatagtcagcatgacgcccaccatcacatacggcgtcaggcggaacacccagccggaggcatccgggccgacgctctgacgccccagcagtttgataatgtcgcgatactcctgcaacacgcccggcccgcgacggttatgcaagcgggcgcgcgccacgcgggttataccggagagcagcggcgcaacggcaaataacaccagcgcctgaattaacggatataaaacactcattctcaggctcctcgactaacaataatcaccaccagtaccgccagttcaaccagcgccatccggcggaacagcaacgcactcccctcgcactgccagcccggcaccagagacaccggattcagccatttgcgtagtttcagcaccggcgcaaacgcctgtttcaccggcatggcaaaaccgtgagcggtaatcaccatacttttttcgtggtcgtaaccgcacacccaggccgcaccgcgggaacggcttggcaaacgatcgcctttgcaaatcgccataatgatgaatggcagcagcgggcaggcaatcagcagcaacgtgatcatcggttgagaaacggtggtgttagcaggctccagcggcagaggtacagcagcagagagcatcggcagtagccacggcgcagcaacaccgccaattacgcagcaaatcgccagtgccactacgcttacgctcatcaggagcggcgcacaggtggcgttttcggcttctttggtgcgcggcgcgccgaggaacgtgacgccatagactttcgccatacacatcaccgccagcgcaccggtaattgccagccccacagcgagcagcggccccagcagacgggcaacaaacgcgccactattgctcagtttgaaaaaactttgatagataacccattccccggcaaaaccattcagcggcggcagcgcagccattgccatcagcccgactaacatggcgatggagataaccggcattttcttgccaataccaccgagtttttcgatatcgcgatgaccggtacggaaccagacgctccccgccccgaggaacagtacgcttttgaacaggctatggttaagcagatggtacagaccaccgaccaggccaagagcaatcagcgccggttgttcgagcgcgatacccgttacgccagcgcccagccccagcaggatgatgccgatattttccagggtgtggtaagccagcaggcgctggatgttgtgctccaccagcgcatacagaccaccgacaaacgcggtgatcatgccgagcaccagcagcgcgatcccccaccacagcggtgcattaccgcccagcagactcagggttaaaatgcccagcaggccaattttcatgactaccgtagaaaacaacgcggcagctggcgcagaggcgttcgcatgtgcctgcggcacccagccgtgcagcggaataatcccggccagcaggccaaagccaatcactccgagcagccagatatcggaaccgagcggcagctgttgcatacgcatatccagcaggcgcagatccagcgtgccgtaacgctgccacagcagccagcaagcaatcgccagcagcagagtgccaagacgccccagcgcaaaccacagtttgccctctttgctgttgctggtgaggaacaccgcgcacagggccatgatttcggccattaccacgaacatgccgaggttgctggcaatgacggcgcagacggcggcagccatcaacatattgatctgcaagccgttgcacttcacctgcgcgtggcgatgccagtcaatgttgtagaggctgacaaacagaccgcacagaccgagcgtaatcagccaaatcgcgttaagcggagagatttgcacatcgtagcttaccaggctcagcgcaccgctcacgccaaccgcgccagtcagtacagtgaagcccgcggctgccgtatacagactaccaaccgcgccgccaattccagctatccagccacttaacgctttttgaaaagaaaagagaaatgccagaacagcggcggcgacaaaccacgccacgccgctattgatcagggaaattgcgctcatttagcctctccactttgagcctgctgaaacaaggtgagatcgccaaagtccgtgttaaaggtcagctcacgcttacgtttgctgacgcgggcgatatcggtgttatccaccagatgcagggctttagtcgggcacatccgcacgcaggccggaccttgttcatcaaagctacaaaggtcacatttgacggcgatcgcgcgaatacctggcacccagtcaagcaatgtgctgacacgcgccggagcaggcggtgccggtggcgctttcggggtattggcgtttgccggaatatccagcggacggctgccggaaaattcaattgcgccaaacgggcaggcgatgccgcacagcttgcagcttacgcacaggctttcattcaactgcacggccccatcgacgcgggtgatggcgttaaccgggcagaccaccgcgcagggtgcatcttcacagtggtgacagagctgcggcgcagattctttttcattcagcatcactctcaggcgcggcatactttgcaggccgtgctggcgatgcgtctcactacaggcggcctcacaagtgtggcagccgatacagagcgtggagtcagcaattacaaaacgattcaccaggcattcctcaggtgattgtcatttttgacgaaaacatgccgatgaaatgtcattttcgacactcatcgacacgcccatccccaaacaggcgtaacgcctgcaaaacgggcaaagcctcagctcatgctgccgggctttgtccctttaccagttggcttaaattcaccggcacattgttttcaatagcggtgtataagctgtcgtaaacgccagcgattttttcgagatagtgttccagaacctgttcgcgatcgcggatgttgaccttgccatcaatcatgccgtcaatgctcagttgcgcctgcgcaatccgctgtttgtcttcgccatcttttgtttcgacgtaatactcgatggtgtggctgttaaagccatccgccagggtgacgtaaatgcgaaaatgttcaaaaaggacgaaacagagttctttgtccggcgcgcagctcatggcgtgatgcaggcgcgctttgcttaacgtgatcccctgaaccaggctattgcagtagatgtgccactggtcctgtaggcgacgatgccgctgtgcgatgtaatcggctttctcgcttatttcccaaatagtcattgtcaggttacccgtttaacagagatgccagctttaagcattttttgtgccaacttttaatttattgttattaaagagatttttaagctaaagatgaatttcgtcgccgtgtcgacgtgtcatttcgacatcatcgacattattcaccgcagggataatcaacactggcacaattattgcttgtagctggcaatagttaatgggaggcgatatgcacgaaataaccctctgccaacgggcactggaattgatcgaacagcaggccgcaaaacacggcgcaaaacgcgtaactggggtctggctcaaaattggcgcattttcttgtgtcgaaaccagctctcttgccttttgttttgatctggtttgccgcggcagcgtggcggaaggttgtaaactgcacctcgaagaacaagaggccgaatgctggtgtgaaacatgccaacagtatgtgacgctactgacccagcgcgtccgccgctgtccacagtgtcatggtgacatgctgcagattgtggcagacgacggtttacagattcggcggatagaaatagaccaggagtgagcgatgtgtacaacatgcggttgcggtgaaggcaacctgtatatcgagggtgatgaacataaccctcattccgcgtttcgtagcgcgccatttgccccggcggcacgcccgaagatgaaaatcaccggcattaaagcgcctgaatttacccccagccagactgaagaaggcgacctgcattacggtcatggcgaagcgggcactcacgcaccgggcatgagccagcgtcggatgctggaagtcgaaattgacgtgctggacaaaaataaccgtctggctgaacgcaaccgcgcgcgctttgctgcccgcaagcaactggtgctcaacctggtttccagccctggttccggtaaaaccaccctgctgacggaaaccctaatgcgcctgaaagacagcgttccgtgcgcagttattgaaggcgaccagcaaaccgtgaacgatgccgcacgcattcgcgctaccggcacaccagcgattcaggtgaacaccggtaaaggctgccatcttgacgcacagatgattgccgacgccgcaccgcgtctgccactggacgataacggtattctgtttatcgaaaacgttggcaacctcgtatgcccggccagcttcgatctcggtgaaaaacacaaagtggcggtgctttccgttaccgaaggtgaagacaaaccactgaaatatccgcatatgtttgccgccgccagcctgatgctgctcaacaaagttgacctgttgccgtatctcaactttgacgttgaaaagtgcatcgcctgcgcccgcgaagtcaatccagaaattgaaatcatccttatttccgccaccagcggcgaagggatggaccagtggctgaactggctggagacacagcgatgtgcataaggtaaaactggctggagacacagcgatgtgcataggcgttcccggccagatccgcaccattgacggcaaccaggcgaaagtcgacgtctgcggcattcagcgcgatgtcgatttaacgttagtcggcagctgcgatgaaaacggtcagccgcgcgtgggccagtgggtactggtacacgttggctttgccatgagcgtaattaatgaagccgaagcacgcgacactctcgacgccttacaaaacatgtttgacgttgagccggatgtcggcgcgctgttgtatggcgaggaaaaataatgcgttttgttgatgaatatcgcgcgccggaacaggtgatgcagttaattgagcatctgcgcgaacgtgctagtcatctctcttacaccgccgaacgccctctgcggattatggaagtgtgtggcggtcatacccacgctatctttaaattcggcctcgaccagttactgccggaaaacgttgagtttatccacggtccggggtgcccggtgtgcgtactgccgatgggtagaatcgacacctgcgtggagattgccagccatccggaagtcatcttctgtacctttggcgacgccatgcgcgtgccggggaaacagggaagcctgttgcaggcaaaagcacgcggtgccgatgtgcgcatcgtttacagcccgatggatgcgttgaaactggcgcaggagaatccaacccgcaaagtggtgttcttcggcttaggttttgaaaccactatgccgaccaccgctatcactctgcaacaggcgaaagcgcgtgatgtgcagaatttttacttcttctgccagcacattacgcttatcccgacgttgcgcagtttgctggaacagccggataacggtatcgatgcgttcctcgcgccgggtcacgtcagtatggttatcggcaccgacgcctataattttatcgccagcgattttcatcgtccgctggtggttgctggattcgaaccccttgatctactacaaggcgtggtcatgctggtgcagcagaaaatagcggcccacagcaaggtagagaatcagtatcgtcgagtggtaccggatgccggtaacctgctggcgcaacaggcgattgccgatgtgttctgtgtcaacggcgacagcgaatggcgcggcttaggcgtgattgaatcttctggcgtgcacctgacgccggattatcaacgattcgatgccgaagcacatttccgcccggcaccgcagcaggtctgcgatgacccgcgcgcgcgttgtggtgaggtattaacgggcaaatgtaagccgcatcaatgcccgctgtttggtaacacctgtaatcctcaaaccgcgtttggtgcgctgatggtttcctccgaaggagcgtgcgccgcgtggtatcagtatcgtcagcaggagagtgaagcgtgaataatatccaactcgcccacggtagcggcggccaggcgatgcagcaattaatcaacagcctgtttatggaagcctttgccaacccgtggctggcagagcaggaagatcaggcacgtcttgatctggcgcagctggtagcggaaggcgaccgtctggcgttctccaccgacagttacgttattgacccgctgttcttccctggcggtaatatcggcaagctggcgatttgcggcacagccaatgacgttgcggtcagtggcgctattccgcgctatctctcctgtggctttatcctcgaagaaggattgccgatggagacactgaaagccgtagtgaccagcatggcagaaaccgcccgcgcggcaggcattgccatcgttactggcgatactaaagtggtgcagcgcggcgcggtagataaactgtttatcaacaccgctggcatgggcgcaattccggcgaatattcactggggcgcacagacgctaaccgcaggcgatgtattgctggtgagcggtacactcggcgaccacggggcgactatccttaacctgcgtgagcagctggggctggatggcgaactggtcagcgactgcgcggtgctgacgccgcttattcagacgctgcgtgacattcccggcgtgaaagcgctgcgtgatgccacccgtggtggtgtaaacgcggtggttcatgagttcgcggcagcctgcggttgtggtattgaacttagtgaagcggcactgcctgttaaacctgccgtgcgtggcgtttgcgaattgctgggactggacgccctgaactttgccaacgaaggcaaactagtaatagctgttgaacgcaacgcggcagagcaagtgctggcagcgttacattcccatccactggggaaagacgcggcgctgattggtgaagtggtggaacgtaaaggtgttcgtcttgccggtctgtatggcgtgaaacgaaccctcgatttaccacacgccgaaccgcttccgcgtatatgctaataaaattctaaatctcctatagttagtcaatgaccttttgcaccgctttgcggtgctttcctggaagaacaaaatgagttatacaccgatgagtgatctcggacaacaagggttgttcgacatcactcggacactattgcagcagcccgatctggccagcctgtgtgaggctcttagccaactggtaaagcgttctgcgctcgccgacaacgcggctattgtgttgtggcaagcgcagactcaacgtgcgtcttattacgcgagccgtgaaaaagacacccccattaaatatgaagacgaaactgttctggcacacggtccggtacgcagcattttgagccgccctgatacgctgcattgcagttacgaagaattttgtgaaacctggccgcagctggacgcaggtgggctatacccaaaatttggtcactattgcctgatgccactggcggcggaagggcatatttttggtggctgtgaatttattcgttatgacgatcgcccctggagcgaaaaagagttcaatcgtctgcaaacatttacgcagatcgtttctgtcgtcaccgaacaaatccagagccgcgtcgttaacaatgtcgactatgagttgttatgccgggaacgcgataacttccgcatcctggtcgccatcaccaacgcggtgctttcccgcctggatatggacgaactggtcagcgaagtcgccaaagaaatccattactatttcgacattgacgatatcagtatcgtcttacgcagccaccgtaaaaacaaactcaacatctactccactcactatcttgataaacagcatcccgcccacgaacagagcgaagtcgatgaagccggaaccctcaccgaacgcgtgttcaaaagtaaagagatgctgctgatcaatctccacgagcgggacgatttagccccctatgaacgcatgttgttcgacacctggggcaaccagattcaaaccttgtgcctgttaccgctgatgtctggcgacaccatgctgggcgtgctgaaactggcgcaatgcgaagagaaagtgtttaccactaccaatctgaatttactgcgccagattgccgaacgtgtggcaatcgctgtcgataacgccctcgcctatcaggaaatccatcgtctgaaagaacggctggttgatgaaaacctcgccctgaccgagcagctcaacaatgttgatagtgaatttggcgagattattggccgcagcgaagccatgtacagcgtgcttaaacaagttgaaatggtggcgcaaagtgacagtaccgtgctgatcctcggtgaaactggcacgggtaaagagctgattgcccgtgcgatccataatctcagtgggcgtaataatcgccgcatggtcaaaatgaactgcgcggcgatgcctgccggattgctggaaagcgatctgtttggtcatgagcgtggggcttttaccggtgccagcgcccagcgtatcggtcgttttgaactggcggataaaagctccctgttcctcgacgaagtgggcgatatgccactggagttacagccgaagttgctgcgtgtattgcaggaacaggagtttgaacgtctcggcagcaacaaaatcattcagacggacgtgcgtctaatcgccgcgactaaccgcgatctgaaaaaaatggtcgccgaccgtgagttccgtagcgatctctattaccgcctgaacgtattcccgattcacctgccgccactacgcgagcgtccggaagatattccgctgctggcgaaagcctttaccttcaaaattgcccgtcgtctggggcgcaatatcgacagcattcctgccgagacgctgcgcaccttgagcaacatggagtggccgggtaacgtacgcgaactggaaaacgtcattgagcgcgcggtattgctaacacgcggtaacgtgctgcagctgagtttgccagatattgttttaccggaacctgaaacgccgcctgccgcaacggttgtcgccctggagggcgaagatgaatatcagttgattgtgcgcgtgctgaaagaaaccaacggcgtggttgccgggcctaaaggcgctgcgcaacgtctggggctgaaacgcacgaccctgctgagtcggatgaagcggctgggaattgataaaagcgcattgatttaactgcaaattgccggacagatctgcctgtccggcatattattcatgaggttttttcggacgatatttttccggcagttctggcaccggacgcttgtcatcgatgagatgacgcacggttaagatcggatgacgccacagcattctcggcccggcccaacgcataatctgtttcatctcttcacgctttgcaggctggtaacagtgcaccggacactgcttacaggctggtttctcttcgccgaacacacatttatccagccgcttttgcgcgtaaacaaacaacgcctcgtaatgctccggctccgcactcgcctgcgggcatttcgcttgataaagatcgatcatttttttaatcgtcagtttttcacgagagatacgcttgccggacatgctgcctccacctcattaagatgtatttatattacatcttaatcttaaagggcactatgactccaaagaagaagggttagccaaccgatacaattttgcgtacttgcttcataagcatcacgcaaaagctgcaaaacagcatctttcccggaaccagcatcaagaactcgccgttcgcttcttcccctgaaatgattaactccggtatcatgtgcgccttatgtgattacaacgaaaataaaaaccatcacaccccatttaatatcagggaaccggacataaccccatgagtgcaatagaaaatttcgacgcccatacgcccatgatgcagcagtatctcaggctgaaagcccagcatcccgagatcctgctgttttaccggatgggtgatttttatgaactgttttatgacgacgcaaaacgcgcgagccaactgctggatattagtctgaccaaacgcggtgctagcgcgggagagccgatcccgatggcggggattccctaccatgcggtggaaaactatctcgccaaactggtgaatcagggagagtccgttgccatctgcgaacaaattggcgatccggcgaccagcaaaggtccggttgagcgcaaagttgtgcgtatcgttacgccaggcaccatcagcgatgaagccctgttgcaggagcgtcaggacaacctgctggcggctatctggcaggacagcaaaggtttcggctacgcgacgctggatatcagttccgggcgttttcgcctgagcgaaccggctgaccgcgaaacgatggcggcagaactgcaacgcactaatcctgcggaactgctgtatgcagaagattttgctgaaatgagcttaattgaaggccgtcgcggcctgcgccgtcgcccgctgtgggagtttgaaatcgacaccgcgcgccagcagttgaatctgcaatttgggacccgcgatctggtcggttttggcgtcgagaacgcgccgcgcggactttgtgctgccggttgtctgttgcagtatgcgaaagatacccaacgtacgactctgccgcatattcgttccatcaccatggaacgtgagcaggacagcatcattatggatgccgcgacgcgtcgtaatctggaaatcacccagaacctggcgggtggtgcggaaaatacgctggcttctgtgctcgactgcaccgtcacgccgatgggcagccgtatgctgaaacgctggctgcatatgccagtgcgcgatacccgcgtgttgcttgagcgccagcaaactattggcgcattgcaggatttcaccgccgggctacagccggtactgcgtcaggtcggcgacctggaacgtattctggcacgtctggctttacgaactgctcgcccacgcgatctggcccgtatgcgccacgctttccagcaactgccggagctgcgtgcgcagttagaaactgtcgatagtgcaccggtacaggcgctacgtgagaagatgggcgagtttgccgagctgcgcgatctgctggagcgagcaatcatcgacacaccgccggtgctggtacgcgacggtggtgttatcgcaagcggctataacgaagagctggatgagtggcgcgcgctggctgacggcgcgaccgattatctggagcgtctggaagtccgcgagcgtgaacgtaccggcctggacacgctgaaagttggctttaatgcggtgcacggctactacattcaaatcagccgtgggcaaagccatctggcacccatcaactacatgcgtcgccagacgctgaaaaacgccgagcgctacatcattccagagctaaaagagtacgaagataaagttctcaccagtaaaggcaaagcactggcactggaaaaacagctttatgaagagctgttcgacctgctgttgccgcatctggaagcgttgcaacagagcgcgagcgcgctggcggaactcgacgtgctggttaacctggcggaacgggcctataccctgaactacacctgcccgaccttcattgataaaccgggcattcgcattaccgaaggtcgccatccggtagttgaacaagtactgaatgagccatttatcgccaacccgctgaatctgagcccgcagcgccgcatgttgatcatcaccggtccgaacatgggcggtaaaagtacctatatgcgccagaccgcactgattgcgctgatggcctacatcggcagctatgtaccggcacaaaaagtcgagattggacctatcgatcgcatctttacccgcgtaggcgcggcagatgacctggcgtccgggcgcagtacctttatggtggagatgactgaaaccgccaatattttacataacgccaccgaatacagtctggtgttaatggatgagatcgggcgtggaacgtccacctacgatggtctgagcctggcgtgggcgtgcgaggaaaatctggcgaataagattaaggcattgacgttatttgctacccactatttcgagctgacccagttaccggagaaaatggaaggcgtcgctaacgtgcatctcgatgcactggagcacggcgacaccattgcctttatgcacagcgtgcaggatggcgcggcgagcaaaagctacggcctggcggttgcagctctggcaggcgtgccaaaagaggttattaagcgcgcacggcaaaagctgcgtgagctggaaagcattagcccgaacgccgccgctacgcaagtggatggtacgcaaatgtctttgctgagtgtaccagaagaaactagccctgcggtcgaagctctggaaaatcttgatccggatagtctcaccccgcgtcaggcgctggagtggatttatcgcttgaagagcctggtgtaataacaattcccgatagtcttttgctatcgggaatattaacgacaactgacgaataaaataaaaacaccctgtataataggaaagcttattttacagggtaaaaccatgccatctacacgctatcaaaaaatcaatgcccatcactatcgccatatatgggtcgttggtgatattcatggtgaatatcagttattacaatcccgcttacatcaactctcttttttccccaaaatcgacttacttatttctgtcggcgataatattgatcgtggaccggagagtcttgacgtcctgcgcctgctaaaccaaccctggtttacgagcgttaaaggcaaccacgaagcgatggcgcttgaggcattcgaaactggcgatggcaatatgtggcttgccagcggtggtgactggtttttcgatttaaatgatagtgagcaacaagaggcaatagatctgttgctgaaattccatcaccttccacatattattgaaatcactaacgacaacataaaatatgccatcgcacatgcagattatccggggagtgaatatctctttggtaaagaaatagcggagagcgaattactctggcctgttgatcgtgtgcagaaaagccttaatggcgagttacaacaaataaacggcgctgattattttatatttggacatatgatgtttgataacattcagacgttcgctaaccagatttatattgataccggaagcccgaacagcgggcggctgagtttttataaaataaagtaatctcatgcttcttctgtgaagcatgagtaacccggtgttattgcaggccattattcatttttcgctaccagcaaagagagatcctgcttcaccagcgcgcgactggcactctccggcaaaccgtcgtctgtaataatctgatcaaactcgcttaatggtaacgccagccatgtcgccacctgaccatatttcgtcgcatcacagaccaaaactcgctggcggctggcactggcaatcgcccgtttcaccgtgactttatcttccgctggcgtagaaatcccccgcacactccaactgcttgcagaaataaaagcctgatcaatcatcaggctgcgcagcatggtcgcagcggcttccccgacacaggaacggttttcccgacacactgcaccgccagtgtgaataattgtgcaattactgttgtcgagcaagtagtccgcaataacgaaatcgtttgtgaccacagtcagactctccatgtgaatcagatgctgtgctatcgctaacgtggtcgttcccgcatccagatagatacaacttcccggctgaacaagacttgccgccagcttgccaatagccgctttttgcgtcattgccagcgcagtttttacctgatgagaaggttcatgcgccacgcgtcccggagactggacgcctccggacaccagcacaacggctccctgctgctccagtttttgtaaatcccgacgaatggtcatatgactcacattcattctgtccgttagttcagcaatactgacaatgcctttttcagctaccatctcaaggatgatttggcgacgctctacgggtatcaacttttgctccttcctttgtcctgcactcattctacgctatttgcctgcgaaacgtgcgcggcgcaactaacgcttagttcacataaaataacacacaatgttaatttatgtgaatcagatcaccataccgttatcttccagcgcttatattcacaatatcaaacaaaatatcacttaaattaacaaggagagcagatgaaaacgggatctgagtttcatgtcggtatcgttggcttagggagtatgggaatgggagcagcactgagttatgtccgcgcaggtctttctacctggggcgcagacctgaacagcaatgcctgcgctacgttgaaagaggcaggtgcttgcggggtttctgataacgccgcgacgtttgccgaaaaactggacgcactgctggtgctggtggtcaatgcggcccaggttaaacaggtgctgtttggtgaaacaggcgttgcacaacatctgaaacccggtacggcagtaatggtttcttccactatcgctagtgctgatgcgcaagaaattgctaccgctctggctggattcgatctggaaatgctggatgcgccagtttctggtggtgcagtaaaagccgctaacggtgaaatgactgtcatggcctccggtagcgatattgcctttgaacgactggcacccgtgctggaagccgttgccggaaaagtttatcgcataggtgcagaaccgggactaggtagcaccgtaaaaattattcaccagttgttagcgggcgtacatattgctgccggagccgaagcgatggcacttgcagcccgtgcggggatcccgctggatgtgatgtatgacgtcgtgaccaatgccgccggaaattcctggatgttcgaaaaccggatgcgtcatgtggtggatggcgattacaccccgcatagtgccgtcgatatttttgttaaggatcttggtctggttgccgatacagccaaagccctgcacttcccgctgccattggccagtacagcattgaatatgttcaccagcgccagtaacgcgggttacgggaaagaagacgatagcgcagttatcaagattttctctggcatcactctaccgggagcgaaaagttgagctaaactctaccgggagcgaaatcatgatcaagattggcgttatcgccgatgattttaccggcgcgacggatatcgccagttttctggtggaaaacggtctaccaacggtacaaattaacggtgttccaacaggtaaaatgccggaagcaatcgacgcactggtgatcagcctgaaaacgcgctcctgtccagtggttgaagccacacagcaaagcctggcggctctgagctggttgcaacagcaaggttgcaaacagatctatttcaaatactgctctactttcgacagtacggcgaaaggtaatattggcccggttaccgatgccttaatggatgctctcgacacgccgtttacggtcttctctccggccctgccggtcaacggacgtacggtttatcaggggtatttgttcgtaatgaatcaactgctggccgaatccgggatgcgccatcacccggtaaatcccatgaccgacagctatcttccccgtctggttgaagcgcaatccacagggcgctgcggcgtcgttagcgcacatgttttcgaacaaggtgtggatgccgttcgtcaagagctggctcgcttacagcaagagggctaccgctacgcggtgcttgatgcgctgaccgaacaccatctggaaattcagggagaagccttgcgcgatgccccactggtaacgggcggttctggtctggcgattggcctggcccggcagtgggcgcaagaaaacggtaaccaggctcgcaaagcagggcgtccgctcgctgggcgcggcgtagtgctctccggtagttgctctcaaatgaccaaccgccaggtagcacattaccgtcaaattgcaccagcccgtgaagttgatgtggcacgctgcctcagtattgaaactctggccgcttatgcacacgaactggcagagtgggttctgggccaggaaagtgtacttgctccactggtttttgccaccgccagcactgacgcattggcagcaattcaacagcaatacggtgcacaaaaagccagtcaggcagtagaaacactgttttctcaactagcggcgcggttagcagcggaaggcgtgacacgctttattgtcgcaggcggtgagacctccggcgtagtcacacagagcctgggaataaaagggtttcatattggcccaaccatttccccggcgtgccgtgggtaaacgcactggataagcctgtctcactcgcccttaaatctggcaacttcggtgatgacgcctttttttcacgagcccaaagagagtttttatcatgagcgatttcgcaaaagtagagcagtctttgcgagaggagatgacgcggattgccagtagtttctttcagcgcggctatgcaaccggtagcgctggcaatctgagcctgcttttacctgacgggaatttactggcgacaccgacaggtagttgcctgggcaatctcgatccgcagcggctttccaaagtcgccgcggatggcgaatggttaagtggtgacaaacccagcaaagaggtgctctttcatctggcgctgtatcgcaacaatccgcgctgtaaagcggtggtgcatttgcacagcacatggagcacggcgctttcctgcctgcaagggctggacagcagcaacgttattcgtccgttcacaccatacgtggtgatgcggatgggaaatgtcccgctggtgccttattaccgaccgggcgataaacgcatcgcacaggatctggcggaactggcagcagacaatcaggcttttttactggcaaatcatggcccagtggtttgcggtgaaagcctgcaagaagccgccaacaatatggaagagctggaggaaacggcaaagctgatttttattctcggtgaccgcccgatccgttatctgaccgcaggtgaaattgcggaattaaggagttaatgcaatgcctcgttttgcagctaatttatccatgatgttcaccgaagtgccttttattgaacgcttcgccgcagcgcgaaaagccgggttcgatgctgtggaatttctgtttccctataactactccaccctgcaaatccaaaagcaactggagcaaaaccatctgacactggcgctgttcaataccgctcccggagatattaatgcgggggaatggggattatccgcccttcccggacgtgagcacgaagcacacgcagacatcgacctggcactggaatatgcattggcgctcaattgtgaacaagtccatgtgatggcaggcgtcgtgcccgctggcgaagatgctgaacggtaccgggcagtatttatcgataatatccgctacgctgccgaccgctttgcgccacacggcaagcgaatattagttgaagcactcagccccggcgttaagcctcattatctcttctccagccagtatcaggcactggctattgttgaagaggttgcgcgagataacgtgtttattcaactagatacttttcatgcgcaaaaagtagatggcaacctgacgcatttaatccgcgactacgccgggaaatatgcgcacgtacaaattgccggactacctgatcgacatgaaccggacgatggagaaatcaactatccgtggctgttccgcctgttcgatgaggtgggatatcagggctggatcggttgtgaatataaacctcgtggcctcaccgaagaagggcttggctggtttgacgcctggcgctaattcgttaaatccctaattacaacgtacccatacatccccccatctacggatggggtaggttaactataactttcagacagggtttcccatgtccacaattacattgttatgcattgcgttagctggcgtaatcatgctgttgctgctggtcatcaaggcaaaggtacaaccattcgttgctttgctcctcgtcagcctgttagtcgcacttgcggcaggtataccggcgggcgaagtgggtaaagtgatgatcgccgggatgggcggtgtgcttggttccgtcactattattattggtctgggcgctatgctggggcgtatgatcgaacactctggtggtgcagagagtctggctaattatttcagtcgcaagttaggtgacaaacgaactatcgctgcgctgactctggcagcgttcttcctcggtattcccgtcttctttgatgtcggctttattattcttgcgccaatcatttacggttttgccaaggttgccaaaataagcccactcaaatttggcctgcctgtcgctgggatcatgctcactgttcacgtggcggtaccgccgcatccaggccctgtcgccgcagcggggttactccacgcagacatcggctggctaaccatcatcggtattgcgatttctattcccgtaggggttgttggctactttgcagcgaaaataatcaataagcgccaatatgcgatgagtgtagaagtactggaacagatgcaactggctccggccagtgaggaaggcgcgacaaaattaagcgataaaataaatccaccgggcgtcgcgctggtcaccagcctaattgttattcctatcgcgattatcatggcgggtacggtttccgcaacactgatgccgcctagccatcccctgcttggtacgctacagctgatcggcagtccaatggtagctctaatgattgcgctggtgctggcattctggttattggctttacgtcgcggctggagcttacaacacaccagcgacattatgggcagtgcgcttcctactgcggcggtagtgattttggttactggtgctggaggggtatttggcaaagtgctggtggaaagcggcgtcggcaaagcccttgccaacatgctacaaatgattgacctgcctctgttaccagccgcatttattattagtctggcgctgcgtgcaagccaggggagtgcaaccgtagcaatactgacaaccggcgggttactcagtgaagcggtgatgggattgaatccgattcagtgcgtattggtgacgctggcagcctgctttggtgggcttggtgcgagtcatattaatgacagtgggttctggattgtgaccaaatatctggggttgagcgtagcagacggtctgaaaacctggacagtgttaacgaccattctcggttttaccggattcttaattacctggtgcgtatgggcggtaatttgaccttaataaaaaggtccgatgggcatcggaccttttattgtgcacagaaaaggccagcctcgcttgagactggcctttctgacagatgcttacttactcgcggaacagcgcttcgatattcagcccctgcgtttgcaggatttcgcgcaaacggcgcaggccttcaacctgaatctggcgaacacgttcacgggtgaggccaatttcacgacctacatcttccagtgttgccgcttcgtaccccagcaaaccgaatcgacgtgccagcacttcacgctgtttggcgttcagctcgaacagccatttgacgatgctctgcttcatatcgtcatcttgcgtggtatcttccggaccgttctctttttcatcggccaggatgtccagcaacgctttttcggaatcaccacccagcggggtgtctacgctggtaatgcgctcgttaagacgaagcatacggctgacgtcatcaactggcttatccagttgctctgcgatctcttccgcacttggttcatggtccagcttatgggacaactcacgtgcggttcgcaggtaaacgttcagctcctttacgatgtgaatcggcaaacgaatagtacgggtttggttcataatcgcccgttcaatcgtctggcgaatccaccaggttgcgtatgtactgaagcggaaaccacgttccgggtcaaacttctctaccgcgcggatcagccccaggttgccctcttcgataaggtccagcaacgccagaccacgattgccataacggcgggcaatttttaccaccagacgcaagttactctcgatcatccggcggcgagaggcgacatctccacgcagtgcgcgacgcgcaaaataaacttcttcttcggccgttaacagtggactataaccaatctcaccaaggtaaagctgagtcgcgtccaacacacgctgtgtggctccctggcttaacagttcctcttcggccaaatcgttatcactgggttcctgttctactaaggccttttcgtcaaaaacctcaactccgttctcatcaaattccgcatcttcatttaaatcatgaactttcagcgtattctgactcataaggtggctcctacccgtgatcccttgacggaacattcaagcaaaagcctggttccgccgatttatcgctgcggcaaataacgcagcgggtttacggatttccccttgtaacgaatttcaaaatgcaagcgtgtactactggttccggtgctacccatggtcgctattttttgccccgccttaacttcttgttgttcccggaccagcattgtgtcgttatgggcgtaggcactcaggtaatcatcattatgtttgatgataatcagattaccgtagccgcgcagcgcgttaccagcataaacaacgcggccatctgcggtcgcgataattgcctgtcctttgctgcctgcgatatcaatccccttgttgcccccctcagaagcgccaaaggtttcgatcactttgccctcagtcggccagcgccaggtggagataggcgtactggtacttgtactgctgacagtcggctcggttgtgcttgctgttggtaccgttacaggcgctgtgaccgtggtcgcagttggcttgttgttcggcaacattttgttagcactctgttcaccgctagactcagaatacgtaattgtcggttggctcgcaacagcaacggtggaattttgtgcaggcttgatcacaactccttgctctgctgcgtcggcctgggtaatggcatttccgccagtgattggcgtaccggaagcattacccacctgcaaggtctgaccaacgttcagcgcgtatggtgcctgaatattgttgcgctgagcaaggtcacggaaatcgttgccagtaatccaggcgatatagaaaagtgtgtcgccttttttcacggtataggtactgccgctataactgcctttcggaatgttcccatactgacggttatagacgatgcgtccgttttccatctgtaccggctgctgagctactggctgcactggctggatttgcggttgttgagtagcctgaatttgtggctgctgcaccggctgaatttgcggttgctgcgctgtagacgtcgtccccattttcggcggcggcgtaatcaacataccagaattagtatttgcaggcgcattgccattaacggagctgaccggtgccggtggattactagtgtcagaacagcctgccagccataggctaaccagactcaaagccgcaatgcggcgaacggtgaattttgggcttcccgcgctcatttatcccccaggaaaaattggttaataaccagtgacataattaccgtgcaaggcaccctactgaacactggaaaagatgttcacgatacgctgacctgcggcaaaataaccaggaaaaatccaggtatttcctcacgttttaagccagctcacccttcactaaagggacaaagcgcacggcctccacggtatcgataataaattcgcctccccgacgacgcacccgtttcaaatactggtgctcctcccctacgggtaagacgagaatcccgccttcgtccagctgcgtcattagcgcagttggaatttccggcggtgccgccgtaacaatgatagcgtcaaacggcgcacgtgcctgccaaccttgccatccatcgccatgacgggtactaacattatgtaaatcaagatttttcaggcggcgacgtgcctgccactgcaagcctttaatccgttcaacgctgcaaacatgctggacaagatgcgccaggattgccgtttgatatccgctaccggtgccaatttccagcacccggctctgcggcgtcagctcgagtaattcggtcattcgcgccaccatatatggctggctaattgtctgcccctgacctatcggcaaagcgatattgtcccaggctttttgttcaaacgcttcatcaacgaatttttcacgcggcacggcggcaagtgcattcagcacctgctcatcctgaataccttgcgcacgtaattgatccagaagtgcttgtacgcgtctgcttaccattgcgtgccaactcccacgctgtttaaccagtcactaaccacatcttgcgcgctatgcgcagttaaatccacatgcagcggcgtgatggagacatagccctcatctaccgcagcaaaatcggtccccggaccagcatcacatttaccgcccggcgggccaatccagtacagcgtattgccgcgcggatcttgctgcgggatcacctgatctgccggatgtcgtgtaccgcagcgcgtcacgcgaatacctttgatttgatccaagggtaaatccggaacgttaatattaagaatacgcccggtgcgcagcggctctttacacagtgcgcgcaaaatactacaggttaccgccgcggcagtgtcgtaatgtttatgcccgtcaaggctgacggcaagcgccggaaaacctaaatgacggccttccatcgcggcggctaccgtaccggaataaataacatcatcccccagattcggcccggcgttaattccggacacaacaatgtccgggcgcggacgcatcagagcattcacgccaagatagacgcaatcggtcggggttcccatttgcacagcaatatcaccattttcaaaggtaaacgtgcgcagggaggattccagtgtcagagaattactagcgccgctgcggttacgatcgggggcgaccacctgaacgtcagcaaactcacgcaaggctttcgccagcgtttgtataccgggtgcatgtaccccgtcatcattactcagcaatatgcgcataatcacctgttgtgttgataagttccctgacaacgctggttgcaaaactacccgccggaagccagaaacggatctctacggtgacgtcatcccaccaattccagcttaattgttgcggatacagcagcatcgctctgcgcgcggcttcaactttttcgcgcaccagtaaagcttgtaattcagtttctgcggcgacagctgcttgttcgaatgccagcgcttcacgctgagttccccattcgccactgcctggcaatgcggcggttatcatcaactctttatcgttgacgcgacgctgtaattccgccagttcttcggtggttgcgacaaaccagctaccacgtccggctaattgtagcgcatcgccgtcaacaacttgattaacgtctgcttttttgaggcgctcagcaacaatctgattaaacaacgcactgcgggctgcgctcaaccaaaaactccgtttattgcgatcgcgcaccggagtattggtttgcgcccagcgctgcgccccctgcaagttgctaccgccaatcccaaaacgttgggcaccgaagtagttcggtacaccttttacgcaaatatcgatcagacgttgttcaacgtcatcgcgattgctcacttcgcgcagaaccagggtaaaggcgttacctttcagcgcgcctaaacgcagcttgcgcttgtgccgcgcatactccagcacctggcagccttccagttgaaaggcgctcagatcgggcatttccttgcccggcacgcgagcgcataaccactgttccgtaacagcatgtttgtctttttgcccagcgaagctgacttcacgggcatgaattttcaggaatttcgccagtgcatccgccacaaaacgggtattgcagccgtttttgaggattctaaccagaatatgctcaccttcaccatcaggctcaaagcccaaatcttccaccaccacaaagtcttccggattggctttcagcagcccggtgccttgcggtttaccgtggaggtaagtgagattatcaaactcaatcattttgttgccttaatgagtagcgccaccgcttcacaggcaatcccttccccacgtccggtaaatcccagtttttccgtagtagtggctttcacgttaacatcatccatatggcagccgagatcttcggcaataaacacgcgcatttgtggaatgtgcggcaacatcttcggtgcctgagcgatgatagtgacatcgacgttgccaagggtataacccttcgcctgaatacgacgccaggcttcgcgtagcagctcgcggctatcggcacctttaaatgccggatcggtatccgggaacagcttgccgatatcccccagcgccgccgcgccaagcaatgcatcggtcaacgcatggagcgccacgtcgccatcagaatgcgccagcaatcctttttcgtaaggaatgcgtacgccaccaatgataattgggccttcaccgccaaaggcatgtacgtcaaaaccgtgtccaattcgcattatgtattctcctgatggatggttcgggtgaggtaaaactcggccagtgccaaatcttccgggcgcgtgactttaatgttatccgcacggccttcgaccaactgaggatggaatccgcaatattccagcgcgctggcttcgtcggtaatagtcgcgccttcatttagagcgcgcgtcagacagtcatgtaacagctcacgagggaaaaattgcggcgtcagcgcgtgccataagccgttgcgatcaacggtatgagcaatggcatttttgcccggttcggcacgtttcatagtatcgcgcactggtgcggcgaggatcccccccgtgcggctggtttcgctcaacgccaacaatcgcgcgaggtcatcctgatgcaaacaaggacgagcggcgtcatgcaccaatacccactgcgcgtcgccagcggctttcagacctgccagcacggaatcggcacgctcatcaccgccatctacaacggtgatttgcggatgattcgccagaggaagttgtgcaaaacggctatcgccaggacttatggcaatgacgacacgtttcacccggggatgcgccagcagcgcatgcacgctgtgttcaagaatggtttgattaccgatactgagatattgcttaggacattccgtttgcattcgacggccaaatccggccgccggaaccacggcgcaaacatccaaatgagtggttgccatgttaattcccgggctgatttatcgattgttttgccccgcagactgtgcgcgcttgctcgcgtcaggcaccagacgataaaaagtttcgcccggcctggtcatgctgagttcattacgcgcacgctcttcgagcgcctcctggccgccattgagatcgtcaatttcggcaaaaagttgatcgtttcgcgctttaagtttcgcgtttgtagcttgctgtgccgccacatcatcattgacgcgggtatagtcatgtataccgttcttaccgaaccacaggctatactgtagccagaccagaatagccagcaacagcagcgttagtttacccatcctgccccctgaaaaacggcatcatcatcccatgcatccgaagacgactctacatcctctgttggggataccgcgacaacgcgggcaaatgtaccacatttgtccattgttacgtatacccagggcgtgcagaacataatctcattattagttacggtttgaattatgaacagaggagacgggaaagtacaaattagcccagtagccacataaacagtgcgccaaacataatgcctactgtcaccagggtgaaaacaatactgtagcgtagctttccgtccatcaaactatgcagcgcaatccccaccactaccgcgacgggcatcagcgccagaaagaaaggccaggtgtagataaagaagaacagcgtgttagagccataaatcaacatcggcatcgccagcgcaaataaccaggagataaaaccgaccacggcaccaggcagactccatgtggtttcttcatcctcagtaaggctgtcgttatttgttagtgtaatgttatggctattacgcatatttgatcctgttactttgacgaaccgggcatggaaacccggtggtgtctcaggatctgataatatcgttctgtctcaacagatctaataattgctgtaccaaatttgttactaattgttcaccattgagatgaatttctgcgctttcaggcgcttcgtaaacggaatctattcccgtaaagttgcgcagttcaccggcacgcgctttcttatataagcctttgggatcgcgggcttcgcaaatcgccagcggcgtatcgacaaacacttcgataaagcgcccttctcctacgcgttcgcgaaccatctggcgttcggcgcggtgtgggctgataaatgcggtcagcaccaccagtccggcttcaaccatcaaattcgccacttcaccgacgcgacggatattctctttacgatcggcatcgctaaaaccgagatcgctgcataatccgtggcgaacattgtcgccatccagcagatacgtactgacgccgagtttatgtaacgcctcctccagcgccccggcgaccgtacttttaccggacccggagaggccggtaaaccacagcactacaccacgatgaccgtggtgtagctcgcgttgttgcacagtgaccggatggctatgccagacgacgttttcgtcatgcagcgccattatttatcccccagcaaatcgcgcgcgccccagtgcggaaagtggcgacgaaccagagcattcaattccagttcgaatgcactgaattcagatggcgcagcagttgcctggctaactggctcgtgcaccataccggcacccacggtcacattgctcaggcgatcgataaaaatcagcccacccgtcaccggattttgttgataacgatctaacaccagcggctcgtcaaaagtgagatccacgaggccgatcccattcagtggcaggttttcaacttcacgctgggtaaggttattaatatcaacctgatagcgaatgccatcaacacgcgcgcgcgtcttcttaccggcaattttgatgtcgtaactctgccctggagaaagcggctgttccgccatccataccacatccacgctcgcgctctgcaccgccggtaacgcttcgtctgccgccagcagcagatcgccacggctgatgtcgatctcatccgtcagcaccagggtgatcgcttctccggcaaaggcttcttcgcgatcaccatcaaaagtcacgatccgcgcgacgttactttccacaccagagggcagcactttgacacgttgcccgacttccacgcgaccggatgccagcgttccggcgtaaccacgaaaatcgagattcgggcgattaacgtactgcaccgggaagcgcattggctgagcatccaccactcgctggatctccacggtttccagcacttcgagcagtgtcggaccgctgtaccacggcatactttcactttggcttgccacgttgtcgccttccagtgcagagagcggcacaaagcggatatccagattacccggcagctgcccggcaaaggtcaaataatcttcacgaatacgggtgaacgtctcttcactgtaatccaccagatccattttgttgatcgccacgaccagatgtttgatccccaacagtgtggagataaaactgtgacgacgggtttgatcgagcacgcctttacgggcatcgatcagtaagatcgccagttcacatgtgcttgcgccagtcgccatattgcgggtgtactgctcgtgccctggggtgtcggcgataataaatttacgcttctcggtagagaaatagcggtaggccacgtcaatggtgatgccctgttcgcgctcagcttgcaggccgtccaccagcagagccagatccagcttttcgccctgggtgccgtgacgcttactgtcgttatgcaggctactgagctgatcttcgtagatttggcgggtatcgtgcagcagacgaccaatcagagtacttttgccgtcatcgacgctaccacaggtcagaaaacgcagcaggcttttatgttgttgcgcaatcatccaggcttcgacgccgccttcattggcgatttgttgtgcaagtgcggtgttcatcttaaaaatacccctgacgttttttcagctccatagaccccgcctggtcgcggtcaatcacgcggccctgacgttcactggtggtggaaaccagcatctcttcgatgatttccggcagtgtttgtgcattactctccaccgcaccggtcagcggccagcagcccagcgtacggaaacgcaccatccgttttttaatcacttcgcccggttgcaggtcgatacggttgtcatcaatcatcatcaacataccgtcgcgttccagaaccggacgttccgcagcgagatatagcggaacaatgtcgatattttccagccagatgtattgccagatatcctgctcggtccagttagagagcgggaagacgcggatgctttcgcctttgttaatttgcccgttgtagttgtgccacagctccgggcgctgatttttcggatcccagcgatggaagcggtcacggaaagagtaaattcgctctttagcgcgggatttctcttcgtcacggcgcgcaccaccgaaggcggcatcaaaaccgtatttgttcagcgcctgtttcaggccttcagttttcataatatcggtatgtttcgcgctgccgtgcacgaatggattaatccccatcgccacgccttccgggtttttatgcaccagcagttcgcagccgtaggctttagcagtacgatcgcggaactcatacatctcgcggaatttccagccggtatcgacatgcagcaacgggaaaggcagcgtacctggataaaacgccttgcgcgccagatgcagcatgacgctggaatctttaccgatagagtagagcatcaccggattactgaattctgccgccacctcgcgaataatgtggatgctttccgcctccagttgccgcaggtgagtaagtcgtatttgatccataaccgttcctttgcaataccgctattttcttgccatcagatgtttcgactatagggagcgtaagagaacgaatgaaattaccaattagaatgagtagttccttaacggaataacgatttggcaaagctaatatcaaaaagtgcttaaggcaccggatttcgggcgtttaggaagatttgaaattgttttagcgcagcggcagtttcatactatggcggtaaaaaaatttgcatggtatttaaggactcactatgttttccgcattgcgccaccgtaccgctgccctggcgctcggcgtatgctttattctccccgtacacgccagcagtcctaaacctggcgattttgctaatactcaggcacgacatattgctactttctttccgggacgcatgaccggaactcctgcagaaatgttatctgccgattatattcgccaacagtttcagcaaatgggttatcgcagtgatattcggacatttaatagtcggtatatttataccgcccgcgataatcgtaagagctggcataacgtgacgggaagtacggtgattgccgctcatgaaggcaaagcgccgcagcagatcatcattatggcgcatctggatacttacgccccgctgagcgatgctgacgccgatgccaatctcggcgggctgacgttacaaggaatggatgataacgccgcaggtttaggtgtcatgctggaattggcagaacgcctgaaaaatacgcctaccgagtatggtattcgatttgtggcgaccagcggcgaagaggaagggaaattaggcgctgagaatttactcaagcggatgagtgacaccgaaaagaaaaatacgctgctggtgattaatctcgataacttaattgttggcgataaattgtatttcaacagcggtgtaaaaacccctgaggcagtaaggaaattaacgcgcgacagggcgctggcaattgcgcgcagtcacggaatagccgcaacgaccaatccgggtttgaataaaaattatccgaaaggcactgggtgttgtaatgacgcagaaatattcgacaaagcgggcattgctgtacttagcgtggaagcgactaactggaatcttgggaataaggatggttatcagcaacgcgcaaaaacacctgccttcccggcgggaaatagctggcatgacgtaagactggataatcaccaacatattgataaggctcttcctggaagaatagaacgtcgctgccgtgacgttatgcggataatgctacctctggtgaaggagttggcgaaggcgtcttgatgggtttgaaaatgggagctgggagttctaccgcagaggcgggggaactccaagtgatatccatcatcgcatccagtgcgcccggtttatccccgctgatgcggggaacaccagcgtcaggcgtgaaatctcaccgtcgttgccggtttatccctgctggcgcggggaactctcggttcaggcgttgcaaacctggctaccgggcggtttatccccgctaacgcggggaactcgtagtccatcattccacctatgtctgaactcccggtttatccccgctggcgcggggaactcccgggggataatgtttacggtcatgcgccccccggtttatccccgctggcgcggggaactctgcgtgagcgtatcgccgcgcgtctgcgaaagcggtttatccccgctggcgcggggaactctctaaaagtatacatttgttcttaaagcattttttcccataaaaacaacccaccaaccttaatgtaacatttccttattattaaagatcagctaattctttgttttcaaacaggtaaaaaagacaccaaccttaaaccatccaaatctaccggggtacgcctgtttaacccaaatgtctggaactcaaatcccgtttccgtattcgttgcccatgccatcactacattgccttcttccgccagtccagctatttgttcccagatcatttcacgaatttttgcggatacatcacctacatatacccctgcacgtacctccaacaaccagatggctaatctgcctcgtaagcgcggaggtacattttcagtgaccacgaccaacatactcatttcagctactccgatggcctgcatctcccagactaacaggaagcggaatggcaacaggctgtgcatcttcaggtggggccggcggttgtatttctccagcggcaagcacgtcctctataagcggaatcaatttggctaatgttttactactgcgaaaaatatccctgcacgccaaacggacttcccggtccggctcaccagggttacgacgcgctatctcaaaagctttcggtacaacagtgtcaaatttaatgatgtctgcaatatcgtaaacaaaggaaagaggctttcctgtatgcacaaacccaatagctggtgcataaccagctgcaagtatcgccgcttcagttacgccgtataaacaggaagttgcagcgctaatgcattggttgatcgtatcgcccttttcccagtctttcggatcgtagcgacgtccattccatgtcacgccgtattgcttcgccagaagtgcgtaggttgcccgcacgcgactgccttctatacctctgagttgctctacggagcgccgggcaggcgcaggttctccaaaccgaagttcaaacattttacgtacgaccttcagacgcaaatcttcatccagagcaagttttgcctgatagagcagcttatcactacgcgcacctccaggctgaccagaagcataaacacgaacgcccgcttcccccacccataccaacaatgttccaacttgcgcagccaggcgtacagctgcatggctaacccgtgtaccaggttccagcatgatgcaggcaacgctgccaacaggaatatgagtgcggatccctgtcttgtcgataagtacaaacgcgccatctattacatcgatctgcccatattgcagaaagatcatggagacgcgatctttgagtggaatgggattaaggggaagccaggtcattttattacacctcaatcacagtggagccaaagatagcaagccacatcccatgcttttagctggcccaataccttgctgtacaagatctattaacgctggcgcgtcgttgatggtgagcacaccttcaaagcaaaccgtttggatctttccacttttaccatcaccagaaaaatactgtggccgttcgcttatgggatgcacatcttcaacgcgcgccgcattgcccaatttacgttgcaaccacgcgatttgttctgcttcttttattaacggaacccgacagcgtttaatattccctttactgtccaggcgcttttgattgtcgagaatagttttgatcggatttgcccgaagccgaaaatagagtggaacaccaacctgaagttgaaattcaacctgtttagttttaatgactgtcgcaacggcagtactaacaggcatttgcgcactctgcaataaaacatgacagccttctggtgtgtttcgcttctcaacatgaaaaagaaaatcacgagcagcatccggtctgtttggaaataaatgccataatccctggtgaagttggtaaagatccctgctccaggccctggcaatgatgactttactgagatacatccatacctcctttaatcacataccattctcgggaagcaaattgtcgaggcaaggtgatcatcggttcgtcgcgcgccgtaaattttaaatgatgccctgtaacactttcctcactatatatatcgccgccaacgggctcataatttaatagcgccttctgaggatcgcttgcctgacatgtccccaaaaaaagcgggtgtgttagtgggcaacttctccgccccaggtaaggtgtataccgaggctttaatactgctttttcaagttcactgataaccatcgttgcatggggtgttaaccagagagcgacggtaaaggaggcatcacataaatattcgcgccatgtttgaatcgtttcatgacttttcaaaccacggtaatcttctcgcgctccaaggactgtatggtaatcacgcaaccccgttacagacacacgacgatcgtcaagaatgagttcatcgcagcgcactgcaaattgcacactctcacttaacgcctgtaaactagaagtatcatcacgttggatcccaagacaagccccgagtagccctaataacccgcttcgggtcggaaatcttccggtaggtcgcgttccttcaaaggtcggctgcccccaggcttgcattggcccagcaagccgcaagatcaaataagatctcatgttcacgcctcgccattattacgaacccaggattttaactgttctaaagtaggcatttgtttaacttgagcagtaattgggtctacatcagataagctgaattgcgcagcagctccgttcagaccatatccattggcaacgcgatcccaatattgattaaacgcctgtatagacggttgcaaaaagccatctttcgctttaaccgctttttcaaaagcatttgccatagaaagtggcatatcggagaaattaaccattaccatatccgcagggttaaaagcggcataagtacgctgttttgctccagggacctctgttgccagcatatgaacaacatgggttgcaatttccagagcctgctccctggaggcaccacctaaattttcctgaagttgagcgaggttaatgttggcataacgataaaaaacaccgctactaaattcctgagttcccagatgtgcagaaccttgttcctgtaaatcatctacagcggtgaaccagtcaatatcagaatcaacctgatgagtagtgatcgcatgcgcaatggacattgcaccatcaacttttcccaactcagtcatcatgccgctggttgccattcttccactaagcgcaatatcaacaccctgctgtaaattcacacgtatggcggcaatatcttccttaagaactttgagcagctttttatcatccagattatcagcctctgcttttgcaacctgctcacagaaccaggctatttctcccacaacccagggagtaaccgcatcggcagaaatcttttcggcttcatcaacacttttaccggagagcagcgctaatgtcttatcgatgattttttggtcaaaacgttcaccaagtttttgccgaagaacatcacgtaattgtgcaagatgaatggttctgagactggattcaccaatattttgtgcgtaataaccacttttacgcatcgcacgtttaaggctttgactactaattcttactcgtcttttgccgccgaaaatagcgtctttctgcatgttcatatcgtcgcggttcagacaactagggctgtgagagatcagaacatgaatattgataaagttagacatagaaaggtttccttacgcatttttgtttgtggtcaatacaaaatcttccagaagttgctggcgttcgcgctttccccaccaggtcaacatcctggccattaatggccagtcaagtacgggttcggcgtgagtaagtaatcgacgtaactggaccatatcggctgttctgtcagcccgaattaattgaaagatacggcgctcgttaattcttccactattggctaaagctcttcccaagctgatacctgttgtttgctcgctttttttgtcctgatgtcggatgacattctttcctgcgctcaggcaaaacaccatgcgcaaaagagcctgctggtgacgtgggttttcccaaccaaaaggttgcaccagcctataaaacgcagggatatcgcgtaattcatcaggttcactaacacgtctaatttgcgcacaacttccattatccagttgttgccaggctcgatataaagccattgcatcaatttcatcagccattacttggccctccttgcggttttaactcccgtaaatgtttgtatagcgtggcgcgggcaagcgctaatgtgcttattaatttaggatgatgtgcatagggagctacagattgattaaatagcatttcacacaattgatgaagtttgtctcgtaaatcagctattacctcatcagcctgggaaaaattaacattcgccagtacatcgggaattaataattcactctgtcgatagaaatgcctttctgcagtctcatgaacagagactccggcccctttgaagtctttatttttaaacccttctgcaaaggtatataacgccttgcgtaaggctgttttatatcccaaaccaacagtcactatttcgtttatcacattgccgtattgttgccacccctgattaaacatcaacacatcatgacgccgttcaagaatagatgcttgattattacgatatccccccataatcaattcaagaggactttgcggcgcaatatttctgaattgattcacaaccgccgccacgcgatttccattttcattttgaataatcttatctaccacaactcggctgatttgtgtccaacttggtgcggaggtggtgaaagcaagaaatttttcctcaacctcccctttcttgactgttaccagacaaggggaatgcggatggggccatagcccattaactgtaaaggtaaatttttccttaagaaaaccggtataacgcaaattgctttcctgtccacagcaagaacatttaccaatcccaatgggatcgcataattcaatatgcgctggttgccagaatagaccacggacaaacccaatactgctagcaggtatagactcattggacttgataggtttaatccaggtaggttggttttccgtatgactttcattaggaaattgtttttgaagacgaggtaatgtgaggacattgagtaacaccgtactacgaagatcgatcccacgtacgaacgttgttacaggtgttcctccacgtaaaccgcttttaaaaccaccaccaaaacctggtgcctgattcgcctggttgaataacgcaatcgcagtgcatccaccacataatgcttcaccctgccccggttgattgacaaatgcacaattcgtcgcgccgcttaccccagccaacagtttttccattggagtcacatcatttgctttgacacctttggtctgcataaagggatgttctgcgtgattaaggtagaacatatctatccacggcgcgatgagttgttgaaactcatcttcagtgagcggattcattatgcgatgtcgaaattcaacgtcatcttttgccggggcgataatttgcccaatgcaaaccagcagtgctaaagcggccagttccatatcgtcacggggcaaacttaatcgccactgatctctactgcagtataggctttgcagatttatgatttggactttccccccgtttcgcgggcgtacagggatccagttatcaataagcaaattcatttgttctccttcatatgctccgacatttctcctgcatttctatacgtcggcacacttccgttatcggtaaaaacaaagaaaaaatacggcgtaattaattcaataatcacattcactgcaaaaatatattcattggtttaatacaattaacctatacatatattaagatgtgttgaattgtttaaagacaataatgcatgcatttcaaatctgcaagttattcgttttattattaaagaaacttttagttataataattaccatgaattttattacataaaatattcatactgtgaatataaaatctcataccgggaaattaaaagaagatgtacattgtgcaccttccctacttaagtagggataaaccgttattggtcttattatcgtcattgataacaatcattcccgaagttatttgggatttgcagggatgactctggtcatcccttcatcccctgtataggtaataacaatactgttaccctgccagacccatccatccagattctgtttcccttccagccaaagtaacccatcttcatctactacttcagaaaaactacgtttccaggtgaagggtacattgacgcgattaagtgcaagcgcctcatactgctgttcatgacttaggtcctcgtagacctggccatcgagcagttgtttaccactagacgtttgtacataaggcaataatggcaggctcatttccccatccctcgttaccgcaagaatggtttcatcgttatcctgcaagctatattcttcagcccactgcaggaccttgcgagccttgaaccttttttcacactcggcgctttcaaatttatccatgccattgccgacccattctggctcatccatttccgcatcatcgtaaatgctatccagccattgccggtaagcatcagggaaaaataaggatgctccattaagctcctcaatatgttgctgcgtccgccacatgactctaacgttgctataaatatgctcatgtcgtccgtaaccctcgccatcaggcagcaaaatggtggcaacaggaatctcaaaaccagcgggacgatatttgcgatgatggcgatgtaaacggcccaatcgttggaaaagcaaatctgcaggacaatgctgagtaattaaccaatcaaaatcaacgtcgagactttgttccacgacctgggttgcgacaagtatccgtccaacatttcgcttcccatttttgccgaaattgctaataactcgattctctttttcacgacgatcgttcagcgtaaagcgcgcatgaaacaaatctatatctacttgcgtgttatttagctcctttagccgttggtagcatacttgtgcaacgtcaaccaaattgcaaataagacagacctgtgcacccgcgtttgccgctgcgatcattcgctctaacatcgtaaggtcaggtaacatgtcagctaaacaaataggttctggctgaatgctaaagcggggcgggagttgttctggatgagctagcagatcaaaacgttgcgcaccattcacacctcgccagttaatgagtggatatgcggagttattttccactggatctgtatgcagaccataagtatccagaagtttctgtttttgtttcattggtagggttgcggaaagaagaataacactccctcccacatcagcctgagccttgagcactgcctccagcaagccgttcatataggtgtcgtaagcatgaacttcatcaacaattaaaacacttcgaccaattcccaaaccacggataaagcggtgtttaactggcaatacgcttatcaacacctgatcaatcgtgcaaacgccgatttgcccaagaaacactttcttattgctttgactcaaccactgacaacactgaacccacgcttcttcttgcccctgttcagtaatcgcgcgactttttatactttgaaagaggtggttaaaccgactattgccatgagcaagaataagatttggggaactaaataagtggctcgcgctcgcttccattctcgtaagcatagcattcgcggtagcttgtgttgggagggcaaaaataacactatccgcaatttgttgatcaataagtttccaagcataggccagcgctgtttccgttttaccggagcctgtaggtgcctctattaccgtcagcccgggagctactggaagagcatcaactaacacctgtaattgtctgggttgatagccattgtccagtagtgcatgaacaccttcataacatcgcttattacttacaagtccactcaactccaatacccggctcgcatcctgctgtcggtcctggaaatacgttctcagagcatttatgtcggaaggcgcatcctcattaaacagaaaggtattcgttgtagtccaggagcctaaccagtcagcaaggctgcaaaaacctgctaacagactactacaatcaggtggtatatcgtttatagataaccccgctggcgttaaaaataatgcttccagtacagatatccactcctcacgagcctgtttatcttgcgcagcataagatgccagagaagctggcatttcccaacggctcttatcttgatcctgggaatgtaatataaaaccatgatgtcctgtaacggcctctacccatggaaaccaggactcataaggatgaggagcggcatcaaaaaaactgaaaaaatccccgagagattgctcactaagactatcctggttaaaccaatacagaccggctgcaccatgattaaatttacggcacatttgtgtacttggaccattaagacttggcgttgcaggatttaatttcagccaactttctgcacttttatattggaatcgtatatcaaactttccaatatcatgaagagcaatgaaaaataacagccaggccttcaccctctgtttacttagcatttcatttcggcaaaaagtattttgcagtacgacactttgatcccaccagcaatctgcaacagcagcaacatcaaggcaatgataaattaacagatgaatatcatttcctttcgtcaagcttttactggattttccccagtaatggcatatatatttaaaaggttccattaatagcctccctgtttttttagtattatcgatgatatcagcgggctatttttcgatgctgctcataaatatcgaattacagtgatatacacatgtcttgcctccctgcaaagaagagactaacattcgaattgtttgggttcgaacgctggcctcaggttgatagaaatatcgcctggggcttttgtccatctggaacctcgcgaatgcttaacgccagacagcctcaagcacccgacgccattctatacctgataattcttcccgcggcgttcacgtttaaaatcaggaatgctgctcgcaaaataaaaacgcccccatcatttctgacagaggcgtttaatttgtccggcaatatttacccttcgtgtaacccacattccctttttaagccaaagaaacgcgtttcttcttccgccatgccgggttcccatttacgggttgtatgggtatcgcccacgcttaaatatccttcatcccataatgggtgatatttcaggccatgtttttgcaggtactgataaatagttcggttatcccagtcgataatcggcagcactttaaatacgccacgctgaattgccagcaccggtaaattggcacgactgccggattgttcacggcgcaggccagcaaaccaggtttgcgcattcagttctttcagagcccggttcatcggttcgactttgttgatgtcattgtacttttcaatgccttcaacgccctgctcccacagttttccgtagcgtgcttcctgccaggctgcgctttcggtagcacggtacactttcaggttgagcttgagtttgtccgttaactcgtcaataaagcggtaggtttccgggaacaagtaacccgtatcggtgaggatcaccggaatatccgggcgaatttgattcaccagatgcaggctcaccgccgcctgaatgccaaagctggaagaaagtacatattcaccgggcagattatccagcgcccaggctacgcggccttcagcgtccagtttttccagttcggcgttagtttccgccagcgccagaatgcgatctaccttcggcagttcgttcagggcgtttagatcgagtttggacatagattcctcactgtttgccttgcctgatgcgacgctcacgcgttcttatcaggcctacaagaccgggctgatggttaatcccacaaatcacgcgccggatcgagcaccgggcgaatgatgcccgcacgcaccgtaaagtcgccgaagccttcacccgcttcgcgctctttcgcccagcgccctatcagttcatcaaggctcgccaggatttccggctcggtgatgttttctttatacatccgtgggatacgtgtcccaatgcggttgccgccaagatgcaggttgtagcgacccggcgctttacccaccaggcccacttccgccagcatcgcgcgaccacaaccgttcgggcagcctgttacacgcatcacgatatgctcatcgctgacaccatgtttcgccattaaattatcgatgttgtcgataaaagacggcaggaaacgctctgcttccgccatcgccagcgggcaagtcgggaaactcacgcaagccatgctgttttcacgctgcggcgtgacggcattcattaacccgctctctttggcgatcttctcgatcttcgctttctcgctttccggtacaccggcgatgatcagattctggttcgccgtaatgcggaaatcgcctttgtggatcttcgcgatctccagcaggccggttttcagcggacgcgccggataatcaaggatgcgaccattttcgataaacagcgtcaggtgccagttatcatcaatgcccttaacccagccaatacgatcgcctcgtccggtgaactcatatggacggatcggttcaaatttgatccccgcgcgacgctccacttccgctttaaacgtctcaacccccacgcgctccagcgtgtatttggttttggcatttttacgatcggttcggttaccccagtcacgctgagttgtcacgacggcttcggccaccgccagcgtatgctccagcggcagatagccaaactcactcgcggtgcgggcgtaggttttcttgttgccgtgttcgatggaaagcccaccgcccaccaacaggttaaagcccaccagcttgccgttttcggcgatcgccacgaagttcatgtcgttggcgtgcagatcgatatcgttctgtggcgggatcactaccgtggttttgaatttacgcggcaggtaggtctggccgaggatcggttcttcatcagtagtggcgactttttcctggtcgagccagatctccgcatacgcgcgggtacgaggcaacagatgctcagaaatcttcttcgcccactcgtacgcttccgcgtgcagctggctctcgtaagggttgctggtgcagagtacgttacggttcatgtcgttagctgtcgccagcgcatcaagaccgacgctgtgcagcatctggtgcaccggtttgacgttctttttcagaatgccgtggaactgaaacgtctggcggttggtcaggcgaatgctgccatagatggtgttttcaccggcaaatttgtcgatcgcctgccactgtttagtggtaatcaccccacccggcagacgacagcgaagcagcatcgcgtggcgcggctccagcttctgttcagcacgttcggcgcggatgtcgcggtcatcctgctgatacatgccgtggaagcgaatcagcaggaagttgtcgcccttaaagccgccggtcagaccgtcgtttaaatcttccgcaatggtgccgcgcaggtagttgctttcatgcttcatgcgctcggcgtctgtcagttttccttcgaccactaaaggccctggatgtttttcgctcattagtagacatctcgctgataacggcgctctacgcgcagctcacttaaaaattcatccgccgcttcggtgtccatgccaccaaattcggcaatcacttccagaagtgcctgctcaacgtctttcgccatgcgattagcgtcgccgcagacataaatgtgggcaccatcattgatccagcgccacagctccgcgccctgttcgcgcagtttgtcttgtacgtaaactttttctttttgatcgcggctccaggcaagatcgatacgtgtcagcacgccatctttgacgtagcgctgccactccacctggtacaggaagtcttccgtaaagtgcggattaccaaagaacagccagtttttacctggcgcttcgtcggcggcgcgttgctgcataaaggcgcggaacggcgcaataccggtgcctgggccaatcataatcaccggggtttctggattggctggcaggcggaagttatcgttatgttcgataaatacgcggacttcgccctcttcttccacgcggtcagcgaggaagctggaggcaccaccggcacgggcgcggccttccacgtcgtaacgcaccacaccaacggtgacgtgtacttcgttctcgacttccgcctggctggaggcgatggaatacagacgcggcgtcagcgggcgcagcagattaattagcgcttcggcatcaagctgtgccggggagaaacgcaccatgtcaacaatcggcgtcgtcgcggcgtaatgctgtaacttcgctttatcgcccaccagcggcagcagtgtttcactgcgggtaagcgtggcgtaattctcaacaatgttggcggtgttgacggtcagttcgaagtgccactgtagcgcttcgttcagaggcaacgttttgccctcgacggtgacaggttcatcgcctttcagccacagcagttcgacaagttctttcaccagtgccggatcgttctgataccagacgcccagcgcgtcacccggctggtaacgcatgccgctgtcacctaagtcaatttcgatatggcgaacgtctttttcagagttacgcccggtaattttctggttaacagagaggctagccaccagcggcgcgtctttgctgtacgggctggtgtggatttcatttaccgcgccagtagcgacggattggctaggtgccgcgacaggcgcacggcttttaagcgcatcaaccacgcgggcgcgccactcgctggcagcagcctggtattcaacatcggcatcgacacggtcgagcaggcgttcaccacccagttccgccagcttgctgtcgaaatctttcccggactggcagaaaaattcataagagctatcgccgaggctaaacacggcaaacgcggtgttttccagctttggcgcttttttggagaacaggaacttatgcagcgcgacggcttcttccggcggttccccttccccttgcgtactcgtcactacgatgagcagtttttcgctggcgatttgtttgaatttatagtcgcccgcgttcaccagcttaacgttcagttttgctgctaataaatcatcacgtaatgcttcagcaacccggcgcgcattgccggtttggctggcggagataatagttatacccggcatttctgcggctggcgctggcgtcgctgcaagcgcagcaggctgctgattgagtacgccccagaaatagccagaaacccaggcaagctgggtgggagttaaatcggtcgtggccgcctgaaggcgtgccagttgctccgggttcaacggaagcaacgcggaaggtgggacctgtgtcgtcatgcgtcgttatgttccagtaagcaaagctgtttctgcgccctgtcagcgcccataaaacagaagagaaggtaaggttaacggggcaaacggtgtggattaaagacgggatagcgataactaataaccaaatcgactaacctgttttagcaatagtctttaacaacaaaatagattaaccaacctaatgaaaaacaaatgaatttagccaatcattaagataaatcagcgattttgcgcaacaaagtcgttttagataatgcgaaaaaacagcctttccggtactctacggcggttttatcgtcctgtagagaaattatgatgtccaccacgttatttaaagatttcaccttcgaagccgctcaccgcttaccacacgtcccggaagggcataaatgtggtcgcctgcacgggcattcctttatggtgcgactggaaattaccggggaagtcgatccgcatacgggctggattatcgatttcgctgaactaaaagcggcgtttaaaccaacctacgagcgcctcgatcaccattatctcaatgatattccaggtctggaaaacccaaccagcgaggttttagcaaaatggatttgggatcaggttaaacccgttgtgccgctgttaagtgcggtgatggtaaaagaaacctgcaccgcaggttgtatctatcgcggcgaatgataagagtgtgtcggcggtcaatttcccttaagtaacgctatgttagggtgttgtgttctggatatctggggcatgacatggaagacgactgcgacattattattattggtgccggtattgcaggcaccgcttgcgcgttacgctgcgcgcgagcgggtttatccgttttgttactggaacgcgctgaaatccccggcagcaaaaatctttccggcgggcggttatatacccatgcactcgcggaactcctcccgcaatttcatctgaccgcgcctcttgaacgacgcatcactcacgaaagcctttccctgttaacgcccgatggcgtaacgacgttttccagcttacagcccggcggtgaatcctggagtgtattacgtgcacgattcgatccgtggctggttgccgaagccgaaaaagaaggtgtcgaatgcatccccggagcgacggtggatgcactgtatgaagaaaacggcagagtctgtggcgttatttgtggtgacgatattctccgcgcccgttatgtggtgctggcagaaggtgccaacagcgtcctggctgaacgtcacgggttagtgactcgtcctgctggcgaagcgatggcgttggggatcaaagaagtgctgagcctggaaacatccgctattgaagaacgttttcatctggagaataacgaaggcgcagcgttgctgttcagcggcaggatctgtgatgacttacccggcggcgcatttctttatactaatcaacaaacgctcagcttagggattgtttgcccgctctcttcccttacgcaaagtcgtgttccggcaagcgagctgctgactcgctttaaagcgcatccggcagtgcgcccgcttatcaaaaacacggaaagtctggagtatggtgcgcatctggtgccagaaggtggcttgcacagtatgccggtgcaatacgccggtaacggctggctgctggtgggcgatgcgttgcgcagttgcgtcaataccggaatttccgtgcgcggcatggatatggcgctgactggcgcgcaggcggcggcacaaacgctgataagcgcctgccagcaccgcgagccgcaaaatctgtttccgctttatcatcacaacgtagagcgcagcctgctgtgggatgttctacagcgttatcagcatgttccggcgcttttgcaacgcccgggatggtaccgtacgtggcctgcgttaatgcaggatatttcccgcgatttatgggatcagggtgataaacctgttccaccgctgcgccagttattctggcatcatttacgtcgtcacggcctgtggcatctggcgggcgatgttatcaggagtctgcgatgtctgtaacgtaagatgttatcaggagtctgcgatgtctgtagcccgtaatctctggcgcgttgctgatgcgccgcacattgttccggctgactccgttgagcgccagacggcagaacggttgattaacgcctgtccggcaggtctttttagcctcacaccggaaggtaacttacgtattgactatcgcagttgcctggagtgtggcacctgccgtttgctgtgcgacgaaagtacactacaacagtggcgctatccgccttccggattcggcatcacctaccgctttggataaataataaggataatttatgcccctcttacacctgctccgccagaatccggtgattgctgccgttaaagataatgccagcctgcaactggcaatcgattctgaatgccaatttatttccgtgttgtacggcaatatctgcaccatcagtaatatcgttaaaaagattaagaacgccgggaaatatgcttttattcatgttgatttgctggaaggcgcgagtaataaagaagtcgttattcagtttttgaaactggtgaccgaggcggacggcattatcagtaccaaagccagtatgttgaaagcggcaagagcggaaggttttttctgtattcatcgcctgtttattgttgatagtattagctttcacaacattgataagcaagttgcgcaaagcaatccggattgtattgagatcctgccaggctgtatgcccaaagtgctgggctgggtgacagagaaaatccgccaaccgctgattgccggtgggctggtgtgcgatgaagaagatgcgcgtaatgcgattaacgcgggtgtcgtggcgctttccaccacgaataccggggtctggacgttagcgaaaaaattactttgacgggataatcgtaaccaattgaatttggtttgatttgtaggccgcacgccacatccgacattcagcgcctgatgcgacgcttgacgcgtcttatcaggcctacaagtccccaggccagaaccgtaggcaggatcatccggcaacacgttattggcaatctgcgtgaatgtttgtcaccagtgcctccagcaccactttccagtcatcaaccacgccaacatctgcctgactaaataccgcagcgctggcgtcatgattaatcgccaccacaaacttgctattgcgtacgcccgccattaacgctgctgcgccagaagcgccaacaacaatacacacctcaggtgccagcagatgtccggaaataccaatcactttttcagcatcaacgccaccgttcatcactcgcgcccgactgtagcccacttcggctcccagcttttctgccagcatagcgatttcctggttatctgcctctccgccctgccccaccaccagcacccgtctggcctcagctaatgggtcgcgggtaacatttttcagatcctctgtgctaaccagccagtccggaagcgcacccgggacaatgttcagttgttgcattccagagggcaacgtggcgtttttcgctgctcccgcctgacgcgccagggaaaggcatagcgggcgtttttctgtttgcagcgtcgccgttagcgcatttccccagtgggatttgcgcacgcttacggttggaatatctaagctagtcacctggcagatgcttgcaccatgtaaacgccaggccagccgggtgctcagttcatcgccaaacgttcccggcggaaagagaacaacgtccgcaggcgttcgctgccactgttccaccaacgcatccagcacctgttccgccactacaggctgaggttcaatctgccagtgcgccagggtacaaccgctgaaatcctgcgccgccagccagcttgctattgcggcattctcctgatttattgtcacaattgcgatattcatggctgcatcctttggcgtaaatagtcctgccatagcttttgagctttttctgctaccgtttgcccatcaatcagcgtcgctccgcgtcgttgctctgctcttgccagttgcagacactgcatcgctggcatttcggcagcaacagttttacggataatttctgctttccccgcagccattcgctggcgcattcccggtactggcaaggccacttcaccgcactgacgcacggcaatcaccgcaggcaagcgaacccggcaacaacgcaacccatgttcagtacgctgttcgagggtgataaacagcgcgtcgagagtgaaacgctccacctgggtgaagcagggccagcccagcatttccgccagcaaaaatggcgtttgcccattctgcccttcgctgctttggcagccggtaattatcagatccagcggattctgatgctgccattcggcaatatggcgagcgacaaattccggcgcaaagcgcagatctgccgccgtctccagcaatacagcttcctcaaacccaagagccatgagatagcgcagccagtgcaatgcccgttcatcccccatgctcaacgcggttaaagacatcggcgtaccgttttttctctgcgccaacagcagcgcggcagcggcctgttcatcagcaccgagtaaacttcgcagtaggctaatatccggtccgcttttaccctgagccgccgcctgccactctttttccgccagcattccggcatccggttcggctttaaacgctaacagaatgttcattcgcacctcctacatttcccgccgccaccagcgggagggctttagtttctggtgcccatagccaggtcacaacaaaaccaaccaacaacactgtcgccaggagcaataaggtgacttgcattccccactgcgccagcacccacggcagcaggccagtacttaccgccgcgccaagtcgactcatggcagtggcaaaaccgacgcccaggctgcgaatgtcagtaggaaaactttccgcaggcaaaatgcccaccagattactgactgcgctaatggtggtgctgaagagaacaaaaagcagcagcgttaaactactgccggaaggcaaacaggccatgactaccagcgttgccgccagcagcaaaaaacttcccagcaaaaatttgcgatgtgccagcaggtgcgtcagaactaatcccagcagcgcgcccacaattaacaacgcattaagcatcaggctggcagtcagcgcatcttccagaccaatagtctgggcgatagttggcagccaggtataaatcacaaaccatgggattacgaggcagacaaagaagacgctgttaaacgccgtgcgccgccagtaacggctagagaacaaggttttgatgtgtttatgggtcgccgttaccacttcatcgcccagtaaaacatggggaccaaaatagcgatgcacgatagcgtgagcttctgcaaaacgcccctggcgcagtagccagcgtggactttctggcgttccccagcgtaataacgtaatcaacaacgcgggcagagctgcgcttgccagtagccagcgccaggcctccgggttttcggaaataaagtgatgtccggcaatacttgccagcacatagcctacggtccacaccacgctgaatgcgcccagcaaaataccgcgatggcggcgcggggaaaattcagccagcaaggtgtgacctacactataatcgcctcccagaccaatgccaatcaaaatgcgcagtccaataagatgctctggcgtggtggcaaaaaattgtaaaaagctagcaagcgtaatcagcaaaaagctgaaggtgaagattttttgccgaccaatatggtcggagatccacccaagaaccaggctgccaaggaacaaaccaaggagcgcgctgccgccgatcattcccgccataaacggcgtcagttgcatggcgggcgtaagctgaataatggcgtaaccaatgacgccgagaacataaccgtcggtcaggtgtgcgccgaaagtgagcgcagcaatgcggcagtgaaaacggttaagcggtaaatcatccattcgcaccggactagtgttcatctttaccccttcattgtccggtaataagaacggcttctcgcctgagaagccgaaaaggcaacgccccgtcatcgcggaacgctgcctgacacattatttttcaatcggatagatagtacccgtattcataatgccattaggatcgaactgctttttcagcccttccagcaacgcccacgcgctgccgtgttccagtttgctccagtgaacgcgatgtttaccgataccgtggtggtgcaccatgctaccgccgaggcgaatggtttcttcacagatgatcttgttgagcggattgtggtacttgtcgatttcctcttccggcttacagtcaacgacgttgtaatcgtagacgaagtacatgttggtgccgttctgatagctatgagaggaatgaccgcccagcatggtgatgtcgtcggcgtgcgggaactcagtacgaatacggttaataacgctttcgtagatttcgtggatgcagctccagcagccggatacttcggtggtaaagcccatgttgccggttttgaggatctgcacacgttcggcagccactttatccggtccccagttcaggttgttaaaccaggtttcgatcagcttgctgtccacgcgctggcattgcgggtagcgggcaacgatttccgcaatcccttcgcccgtcaccttcgcaatgcgagggttaccttcagccataaagatcagcacgcattttccgtcggcaaaatgggtgaagtgttgggtgccatcttcagcgtcatacaaacgagcgatactcggacgatacccttccaccatgatttcacgcaggatgttgaagccggttttcatgtcttccaggatatagccgtagaagaggttgttttccggggtgaatttaaagattttcactgttacttcagtgatatagcacaatgcaccttcgttgccgatgatgatgtgacgaatgtccgggccagccgcgcggcgtggcacgtttttaatgcgtgtgacggtgccatcagccaatactgcttccagaccaacgaccatatcttcgattgcgccgtagagtgtggagaactgcccgatacttcgggttgctaccaggccgcccatctgcgccagcggcttactctgcggagaatgccccgtggtgtaacctttttcacgcaacgcgttttccagcacttccagcggaacaccacattgcgccgtcgcctgcatattctcaatatcaatattaatgatttgattcatggcggagccgtcgagcaccacgctgttttctacaacagtttccagcccaccttcggtggcggaagcaccggtacgcggcacaccgttaattttgtgcgcattcataaaattcagcacacgggatacttgctctgtggaaccgagttttacgaccgctgccggaatcggcaaagtataaatgccatgaatatccggaaatttacgaaaacggtcaatactgtttttctttaatactgtttcatcggtaattacgcgatctgcaccaacaatttcctttagctggtcgacaatcgctgcgcgagataaagacatagtaattccttcctgataataaaaatggaataatcattaataagagaaaacagaaaccaccgttatgggttagcgcactaaataaccgccatcaaccactaataaatgcccgttgacataattgcttgccggacttgcgaggaatacggctgcgcccattaaatcctgagtatcgccccaacggtttgccggaatatgatcaagaacgcgctgattggtttctggattactgcgtgtcgccagcgtaatatctgttgcataatagccaggggcgataccatttacctgaatattatattgacctagttcatcacaataagctttggtgaacccggcaagagcatgtttagtggcagaatatgcaggactccattgtccacctaagtaagagaacaaactacagatattaataattttgccgcttttctgcgggatcataatttttgcagcttcatagcttaactcgaatgcggcggtcaggttcacatcaatcatcggatcccagtcggcacgaccgaagtccagcaccttattcagcttacaaataccggcattgttaaccagaatatcaactgtaccgaaacgctcacagcaagcagcgataatcttctgcggcgcgccttctgcggtgatacccacctgcatgaagtccacctcaacaccctgtttttcaatcatttcctttgtttcgccgttatctttgacgaaactaggaataaagatatttgcgccagctttggccaacgccatggcaaatgcctggcctaaaccgctattcccaccggtaacaattgcggttttacctttcagggagaaaaaatccatactgaacgcattgagagattcgatactcatagttagctccaatttccgtaaggcaaaaaaaaagaaaggtaacttcccccgcgagagggaagttacctttctcattatctctggtaactggagataatttttagcataagggcataactgctaatgtgatcgtaatcacagtgtgatattcgtattgtcaaataattttaaaaagcagaagcgtgattactctcacacaacacctctgctttccatgttatttattatttcaattactagagacctgagaaaagtaatccacctgaaagggcggcttacttttctcttttttttgtctattacaaatgggaatacgatatgcaacacaacagttatcgccgttggataaccctcgcgataattagttttagcggcggcgttagtttcgacctggcttatttacgttatatttatcaaattcccatggcgaaatttatgggattcagcaataccgagataggtttaataatgagtacctttggtattgcggccattattctttatgcccccagcggcgttattgccgataaatttagtcaccgcaaaatgattacttccgcgatgatcattaccggattactgggtctgttaatggcaacgtatccaccgctgtgggtaatgctctgtattcagatcgcctttgcgataacgacgattttaatgctgtggagcgtgagcattaaagctgcaagcttgcttggcgatcatagcgagcaagggaaaattatgggctggatggaagggctgcgcggcgtcggtgtaatgagcctggcggtgtttaccatgtgggtcttttctcgctttgcaccggatgacagcaccagcctgaaaacggtcattatcatctatagtgtggtttacatcttgttggggattctgtgctggttttttgttagcgataacaacaacctgcgcagtgccaataacgaagaaaaacagagtttccagcttagcgacatcctggccgttttgcgtatcagcaccacctggtattgcagcatggtgatttttggcgtcttcaccatctacgccattctgagttactccaccaactatctgaccgaaatgtatggcatgagcctggtggcggcgagctacatggggattgtgatcaacaaaatattccgcgcgctgtgcggcccacttggcggcataatcaccacctacagcaaagtgaaatcccctacccgcgtgatccaaatcctttccgtactcggcctgctgacgttaactgccctgctcgtcacgaactctaacccgcaaagcgtcgcgatggggattggcctgattttactgctgggattcacctgttacgccagtcgcgggctgtactgggcctgccctggcgaagcgagaacaccgtcttacattatgggcaccacggtaggtatttgtagcgtgattggattcctgccggatgtcttcgtttacccaattatcggccactggcaagacaccctgcccgctgcagaagcctaccgcaatatgtggctgatgggcatggcggcgcttggcatggtgattgtctttacctttttgctgttccaaaaaattcgtactgctgatagcgcccccgcaatggctagcagcaagtaagccaggaaaattacaggagaaaaatcatgagcaaaaaatacatcatagggattgatggcggaagtcagagcacaaaagtggtgatgtacgatctggaaggtaacgtggtttgcgaaggcaaaggcttattacagccgatgcacacgccagatgccgatactgcagaacatcctgacgacgatttatgggcaagtttatgttttgccggtcacgatttgatgagtcagtttgccgggaataaagaagatattgtcggtattggtctgggatccatccgttgctgccgtgcgttattgaaagccgatggcacgcctgctgcgccgttgattagctggcaggatgcacgcgttacacgcccttacgaacacactaaccctgacgtggcatatgtcacctcttttagcggttatctgacgcatcgcttaaccggcgagtttaaagacaatatcgccaactattttggtcagtggccggtggattataagagctgggcatggagcgaagatgctgcggtaatggataagtttaatatcccccgtcatatgctgtttgatgtgcaaatgcctggcaccgtcctcggacatatcacaccacaagccgcactggcgacacatttcccggcaggactgccggttgtttgtaccaccagtgataaaccggtagaagctctgggggccggattactggatgatgaaacggcggtaatttctcttggcacttacatcgcattgatgatgaacggcaaagcactgccgaaagatccagtagcgtactggccgattatgtcttctattccgcaaacattgctgtatgaaggttacggtattcgcaaaggcatgtggacggtgagctggctgcgcgacatgctaggcgagagcttaattcaggatgccagggcgcaggatcttagtccggaagatttactcaacaaaaaagcttcttgtgtgccgccaggctgtaatggtctgatgacggtgctggactggctgaccaatccgtgggaaccgtacaaacgcgggattatgatcggctttgattccagcatggattacgcatggatatatcgtagcatactggaaagcgtggcgctgacgctgaagaacaattacgacaatatgtgtaatgaaatgaatcactttgcgaagcatgtgatcattactggcggcggtagcaacagcgatctgtttatgcagatttttgccgacgtgttcaaccttccggcacgacgtaacgccattaacggttgtgcaagcctgggggcagcgattaatacagcggtaggtctggggctatacccggattacgcaacggctgtcgataacatggttcgcgtgaaagatatctttataccgattgagagcaatgccaaacgctacgacgcgatgaataaaggcattttcaaagacctaaccaaacatactgatgtgatcctgaaaaaaagctatgaagtgatgcatggggaattggggaatgtggatagcatccagagctggagcaatgcgtaagtgaggaaggccgggcgggaaactgcccggcctgaacatacctgaatggttatccccgctgacgcggggaacataagttcgacaacttaaaaaatgataacaagtccggtttatccccgctgatgcagggaacataataaaaactttaactagttcggtttatccctgtttttacaaggaatattaactacactcgatgtctttagaataaaagacaatacgaatcgcactttatcaattttcacttaaagtatgaactggatatctttattcataagaactattcatcaacagcgtatagaggcggttatgtaaaaccactcattagcctcaaaacaaagacaaacttccagatttattacttaaccaatgaataacaagcttaaaaaatatactgttattctaaagaaaaaattaacaggcattaattcaatattaaaaaaataatagattaaaatttcttaacgatttaagaatcatacaaataacactttgattaaatttaattttttgtatcgataattgtgaacctctctggcatggagaactattttgaacatgaggtgttacgtggatatgttgcttattacaagtactgctaatataaaaacttgagaaagagataacgggttatatggtggtttatccccgctggcgcggggaactcgacagaacggcctcagtagtctcgtcaggctccggtttatccccgctggcgcggggaacacctgttttcgcaaatctatggactattgctattcggtttatccccgctggcgcggggaacacgggcgcacggaatacaaagccgtgtatctgctcggtttatccccgctggcgcggggaacactggctctgcaacagcagcacccatgaccacgtcggtttatccccgctggcgcggggaacacgaaatgctggtgagcgttaatgccgcaaacacaggtttatccccgctggcgcggggaacacattacgcctttttgcgattgcccggtttttgccggtttatccccgctggcgcggggaacactctaaacataacctattattaattaatgattttttaagccagtcacaatctaccaactttatagtatcacacaaacaacacatccattatgttaaagagcacttaatccattgattaaaaaggtaaatatttaaaataactctatacaaactaaaatctaccaaactttaccgcaataattttcactccagcgaaaaattaatgccacagaatttgtagagaatgctaatgattagccctggatgggtaaaatggaggagttttcagaggcgacaaacaatataaatgagtagaagtctttacaggttccacccatttataacgcttataaatgtttaatcaggcaatatttagatatttatgtgtttgcatgctcaaacgccaattacgcgcaatgcaggtttcaatgcacaaacgtgtggcatcatccttttggctaatcggctgcagtgcaatgactcgcggtttatcatcggtcagcgttgccagtagttcatccagtgcttcaatatcgcgtacgcgccccactggatgcttgatttcgttggctcgctccagtgcctgactcaacacttcatagccgccgcgcatgttcagctttgggcttacggtaacccaggtattcggtgtgcagcgtacctcatgagtaccactggtttcgatctggcagctaaaaccgttcttttcgagcagatcagtcagtggcagcaaatcatgaatgcaaggctcaccacccgtaatcaccacatgccgcgcggtgtatccctggcgaccaatgacagccagcaaatcttcactgctcgcagccccccacttatcactctctttggtcttcgccagaatgctgaaaagggagacttcccgatcctcaagcttttcccaggtgtgtttggtgtcgcaccaggcacagccaaccgggcatccctgtaaacgaataaaaatggcgggaacgccggtaaagtaaccctcaccttgcagggtctggaacatctcgttaatcgggtactgcatagcattctctgtgaagtggataattgttaattattgcagatcctgccacaacaatcatgtcttattaacattctgttacaggcaggtttaaagaaaaatgcgaaacatatcgttaataattaaagggagtaacgtattatgtcagaagaaaataaagaaaatggatttaatcatgtcaaaacattcaccaaaattatatttattttttctgtattagtttttaatgataacgaatataaaattaccgatgccgccgtcaatttatttatccagatttaatgagaaatttataatgcgctatttcatactaatgttcactttcgtatgttcctttgttgcagcccaaccaactattgtcccacaattacagcaacaagttacggatcttacgagtagcttaaacagtcaagaaaagaaagaactgacgcacaagttagaatctattttcaataatacccaagtgcaaattgccgtattaattgttcccacaaccaaagacgagacaattgaacaatatgctacaagagtttttgacaattggcgtttaggagatgccaaacgtaatgatgggatactgatcgttgttgcctggagcgatcgcactgtccgcatccaggtaggttatgggctggaagaaaaggtaaccgatgctctggctggagatatcatccgtagcaacatgatacccgcatttaaacaacaaaaattagctaagggattagagctagctataaacgctttgaataaccaactcactagtcaacaccaatatccgactaatcctagtgaaagtgaaagtgcgtcttccagtgatcattattactttgctattttttgggtatttgcagtgatgttcttccctttctggttttttcatcaaggcagtaatttttgtcgcgcatgtaaaagtggagtctgtattagtgcaatctatcttttagatttattcctgttctccgataaaattttttccattgctgtattttccttcttttttactttcaccatatttatggtctttacctgtttatgtgtacttcagaaaagagcatctggtagaagttatcatagtgacaacagcggttccgctggaggcagtgatagcggcggatttagcggcgggggcggttcttctggaggtggcggcgcatccggccgctggtaactcaaccataaaaaatgccagcccggaggctggcatttttaaatcagataaagtcagtcttatgcctggcctttgatctctttacgaccgttgtacggtgctttttcgcccagagcttcttcgatacgaatcagctggttgtatttagcaacacggtcagaacggctcatagaaccagttttgatctggcctgcagcagtaccaacagccaggtcagcgatggtagcgtcttcagtttcgccagaacggtgagagataactgcagtgtagccagcatctttcgccatcttgattgcagccagagtttcggtcagagaaccgatctggttgaatttgatcaggatggagttagcgatacctttttcgataccttctttcaggatcttggtgttggttacgaacaggtcgtcaccaaccagctggattttgtcgcccagaactttggtctggtatgcgaaaccgtcccagtcagattcgtccagaccgtcttcgatagaaacgatcgggtactgtttggtcagttcttccaggaagtgagtgaattcttcagaggtgaacgctttgttgccttcgccagccagaacgtatttaccatctttgtagaattcagaagctgcgcagtccatcgccaaagtgatgtctttgcccagttcataaccagcagctttaacagcttcagcgataacagccagagcttcagcgttggaacccaggttcggcgcatagccaccttcgtcaccaacagcagtgttcatgcctttcgctttcagaacttttgccaggtgatggaaaacttcagaacccatgcggatggcttctttcacagttttcgcgccaaccggctgaatcatgaattcctggatatcaacgttgttgtcagcgtgctcaccaccgttgatgatgttcatcatcggaaccggcatagagtatttgcccggagtaccgttcagttcagcgatgtgctcgtacagcggcatacctttagcagctgcagcagctttggcgttagccagagatacagccaggattgcgttcgcgccgaatttggatttgttttcggtgccgtccaggtcgatcatgatcttgtcaatgccagcctgatctttagcatctttgccaatcagcgcctgagcgatcgggccgtttaccgcagcaacagctttggttacgcctttacccaggaaacgggatttgtcgccatcgcgcagttccagagcttcacgggaaccagtagaagcaccactcggagcagctgccataccgacgaaaccaccctccagatgtacttcggcttcaacagtcgggttaccacgggagtcgatgatttcacgaccgatgatttttacgattttggacattaggttttcctcaagtcactagttaaactgaaactccagacaaacaacgcgtacccagggtacgcgttgccgctctaacttttttacttacttcgcctgacgtttctggaactcgctggcggctttcacaaagcctgcaaacagcgggtgaccatcacgtggagtagaagtaaactccggatggaactggcaagccacgaaccacgggtgattcggaacttcgatgatctcgaccaactgatcatccccggaacggcccgcaacgcgcagacctgcatcttcaatctgtttcaacagcatgttgttgacttcgtaacggtgacgatgacgctcaacaattgtcggcgcattgtacagctggcgaaccaggctatcgtcaaccaactggcactgctgtgcgccgagacgcatggtaccgccgagatcgctcttctcgctacgaacttcaacgttgccgttttcatcgcgccactcggtaatcagcgccacaaccgggtacttacagtctggcacaaattccgtagagttggcgttctccatgttggcaacatggcgagcgtaatcaattaacgccacctgcatacccaggcaaatgcccagataaggaatattgttctcacgcgcaaaacgcgcggtcgtaatcatgccttctacgccacgatagccgaaaccgccaggtacgaggattgcgtccagacctttaaggatttcaacgccgcgcgtttcaacatcttgactatcgatcagtttgatgttgacgctgacacgattcttcagcccaccgtgtttcagtgcttcgatcacacttttataagcatccggcagttcaatgtacttgccgaccataccgatggtgacttcacttaccgggttcgcttcttcgaagataacctgttcccattcggacagattcgcttccgggcagtttaagctgaatcgtttacaaatataatcgtccagcccctgagatttcaacaggcccggaattttatagatggaatcgacgtctttcagagaaataaccgctttttccggaacattacagaacaatgcaatcttcgcacgttcgttcgccggaacagcgcgatcactacgacaaatcaggatgtcaggctggataccgatggagagcagctcttttacagagtgctgagtcggtttggttttgacttcaccagacgctgccatgtacggcaccagcgtcaggtgcataaacagagtgtgctcacggccaatttcaacagccatctggcgaatcgcttcgaggaacggcaaggattcgatatcacctactgtaccgccgatttctaccagtactacgtcatgaccttcgccaccttccagcacgcgctctttgattgcgttagtgatgtgcggaataacctgcacggttgcgccgaggtagtcaccgcggcgttctttacgcagaacgtcagagtagatacgacccgtggtgaagttgttgcggcggctcattttggtacgaatgaaacgctcgtagtgccccaggtccaggtcggtttcagcgccgtcttcagtaacgaacacttccccgtgttggattgggctcatagtacctggatcgacgttgatgtacggatccagtttcatgatggtcacattgaggccacgggcttcaagaatggctgcgagggaggctgcggcaatgcctttacccagagaggatacgaccccgccggtcacaaaaatatagttcgttgtcatgctgaacctgagaagttaggttgaaaagacgatggaataaccaagacgggaaagcagtatacccgaacatgacctgtgccacaaactttcattatccctcctcttcgccagcgcactattgaaatcaggagtgagaaaatagcccctttggggtaaatgtttttgacgcaaatcaagcgcttgtcatttaaaaaatgacacaaatggcgcttgaccgcgtaattcccttagagatcaatttcctgccgttttacctgttgccagacttcttccattgtttcgaggtcaacacctgtcatttccagtccacgcgcggcaacaatacgctccacttcgcgaaaacgacgctcgaatttttcgttcgctttttgcaatgcgatttctgctttcgtccctaaatggcgagccagattaaccgtggcaaacagcaggtcccccatttcctcctccagtttagcctggtcgacaacagcctgccgcgcttcgtacatcacctcgtcgatctcttcgtagactttatcgactaccggaccaagcgtcgtccaatcgaagccaacgttggcgcaacgtttctggattttttgcgcacgcattaaagccggtaaactacgaggaatatcgtccagcgcgctatgctgcgctttctgcgcgcgctcttcggttttgatttgctcccaacgggcaagcacttcactactgttttcggcagaactatcagcaaaaacatgcggatggcgacgctctaatttatcgctaatagcagcgcaaatatcattaaagtcaaagcgcccttcttcctgagccatttgcgcgtaaaacaccacctggaatagcagatcgcccagttcaccgcgaagatcgtcaaaatcttcacgggcgatggcgtccagcacttcgtaggtttcttcaagggtgtaaggcgcaatggtggcaaatgtctgctctttatcccacgggcagccgttttccggatcgcgcaggcgctgcataatagtgagcaaacggtcgatttgattcattgaattgtcctgaaaattgcgggtctgtcaggtggaaacctgtgaccagaatagaagtgagttagtaacattacccaatcagtacgttaattttggctttaatgagttgtaattcctctggggcaactgttcctttcttcgttgctcctcttgcccgccaggcgatactttttacctgatcagctaacgctacgccatcacgttcctgaccggataaaacaacttcgaacggatatcctttactttgcgttgtacaaggaacacacagacacatacctgttttgttgttgtacatgaaaggactcaggacaacagctggacgatgtccagcttgctcgctaccttttgtcgggtcaaaatcaacccaaatcagatcgcccatatcgggtacgtatcggcttaccattaccagacttccttatctttcggctctccccagtcgatattctcgtggaggttttccggcgtgatgtcgttgaccagttcagcaagcgtaaatacgggctctttacgcactggctcaataattaatttgccatccaccaggtcaatcttcacttcatcatcaatattcagattgagcgcctgcattaacgtagccgggatccgcaccgccggactatttccccaacgctttacgctactgtggatcataaccctttcctcaaaccgctatcatatgtagatacagtatatatcaatctacattgtagatacgagcaaatttcggcttaactcccgtgcaaccgacgcgcgtcgataacatccggcacctggttgagtttacccagcacgcgccccagcacttgcaggttgtaaatctcaatggtcatgtcgatggtcgccagttgctgtttggtgtcgctacggctggcaacgccaagcacgttcaccttctcgttggcgagaatggtcgtgatatcacgtaacaacccactacgatcattagctaccacgcggaccaccaggctatatccggcggagtagctctcaccccataccgcgtcaacaatgcgttctggcgcatgggagcgcagttccgccagttgttcgcaatcggcgcggtgtacactaataccgcgcccctgggtaatgaagccgacaatctcatctccaggaatcggctggcagcagcgcgcgatgtggtgcatcaggttgccaacaccttcgactaccacgcgaccgttatctttactgcggttttgcggcgtgtagcttttttgctgaagttgcttcagcgcggcggcgtcctgctcttcggcactcggcttattaaattggctttgcaggaagttcaccatctgattgagacggatatccccgccaccaatcgccgccagcaactcgtcgacatcattgaagttgtaacgcggcagcagatgtttttctgcttctttcaggctgatccccagatgttccagctcgtcgtcaaggatttgccgcccagccagaatgtttttgtcacggtcctgtttacggaaccaggcgtgaattttgctacgcccacggctggttgtgacgtaaccgaggtttgggtttaaccagtcacggctggggttcggctgtttctgggtgataatttcaatctggtcgcccatctgcagctggtaggtgaacggcacaatgcgcccgccaatttttgccccgatgcagcggtgtccgacatcactgtggatgtggtaagcgaagtccagcggcgtacttcccgcaggcaaatcaacgacatcacctttcggcgtaaagacgtacacccggtcgtcaaagacctgactacgtacttcgtcgagcatttcgccggaatcagccatctcttcctgccacgcaatcagtttacgcagccaggcaatccggtcttcatgtccgctacgtgcgccgccagcagccgcgccctctttatatttccagtgcgcagcaacacccaactctgcatcttcatgcatctgtttggtgcggatttggatctcaacggtttttccacccggccccagaaccacggtatgaatagactgataaccgtttggtttcgggttagcgacgtaatcgtcaaactcatccggcaggtggcgatagtgagtgtgcactatccccagtgcggcatagcaatcctgtaaacgctcggcgacaatacgtaccgcacgcacatcaaacagctcatcaaaggcgaggttctttttctgcattttacgccagatgctgtagatgtgtttcggacgaccatacacttccgctttaacgccttcagctttcatctcagcgcgcagatgaccaacgaactcttcgatgtagtgttcgcggtcgagacgccgttcatgcagcagtttggcaattcgtttgtattcggttggatggaggtaacggaagcagtaatcttccagttcccatttcagttgtccgattccgagacggttagccagcggtgcgtagatgttggtacactcttttgccgccagtacacgttcatcttccggcgcatcttttacttcgcgcagatgagcaatacgctccgccagtttgatgactacgcagcgaaaatcatcgaccatcgccaataacatccggcgaacgttatcgacctgttcggaggaaacagaatcagtgtgcgtcgctttcagctggcggatcgccgccatatcacgcacgccgtgaataaggttaacgacgctcttaccgacgctctcacgcagcacatcttcgctgactacgttggcatccgccagagggaaaagcagcgccgcccgcagcgtgtcaatgtccatacttaatgtgctgaggatctccaccatctcaacaccacgccacaataacagactggcatccggatgcccctgcgtctgttgcagacaatacgcccaggtttcggctaagcactcacagctcttctggctggtaatacccagacttgcgatccatttttccggatcaaattcaccagccttattgatatgtgcacttcttaccgcaaccatcgtcctctcctttagggaccagacctgccgaaatcggcaaatcgcaattatttaacgcggctgaaaagtaccatgctttccagatgtcccgtgtgtgggaacatatccagcatcgccagtcgcgcaatggtatatcctgcttttaataacgcttcgctatcccgagccagcgttgcagggttacaggatacataaactatacgaataggttccagttttataatttgctgcataacacctgcggcacctgctcgcgccgggtccagcaacactttatcgaagccgtttttcgcccacggctgctttgtgacatcttcttcaagattttcgtgataaaacgtcacattctgtaagccattaagacgcgcattctgctggcctttttccaccagcgccggaacaccttctacaccgaccacactggcagcttgtgtcgccaatggcagtgtaaagttgcccataccgcagaacagatccagtacgcgatcttcaggttgcacatccagccattccaacgcacgcgctaccattttttggttcacacccgcattgacctgaataaaatcgcgcgggctaaaagttaagcgcaacccgttactgtcataccagggcatctcaccagagacggtttcgagtatctcactatcgggggcgagatacagatccaggccttcagaatggctaaagcgttccagtttttcgcgatctgcgctacttagcggtgcggtatggcgcaaaatcatcagcgtgccgctggttgcctgtaccagttcaacatgaccaagatggcgcatagcttgtaagctgcccagacatgccctgactttgggcagcaatgcttcaagttggggcgctaaaatggggcattgtttgacgtcgacaatgtcactggagcccgctttgcgaaaccccatctgaagttgctgtgttttcggtaagtagttcagacttaaacgcgcgcgacggcgatagccccagggaacatcggcgatcacttcagagacatcgtgtttcattaatcgggcgagtgccgcacttttgcttcgctgctgtaaatccacgctggcgtgttgttgctgacagccaccgcatacgccaaaatgaggacagcgtggcgtttcgcgttccgggctatcgcttaaccggcgtacgactttagcgcgggcatactgttttttatcttcagtaacagtaacttccgcgttttcctgcggcaataatccggggataaatagcgttttgccgttatgtcgcgccacgccctgaccaaaagagtcgaggtcgttgacactaacggttatgatctgacgcgtcgtcgtgcgtcgttttgcagagtagaattgcgccattggcgagactttctcaatttaacagtgtgaccttaattgtcccataacggaactccatgaccaactacagcctgcgcgcacgcatgatgattctgatcctggcaccgaccgtccttattggtttattgctgagtatctttttcgtcgtgcatcgctataacgacttgcagcgtcaactggaagatgccggtgccagcattattgagccgcttgcagtttctactgaatatggcatgagcctgcaaaatcgcgaatctatcggtcagttaataagcgtactgcatcgtcgccattccgatattgttcgcgcgattagcgtttatgatgaaaataaccgactctttgtcacctccaattttcatcttgatcccagtagtatgcagctcggcagcaacgtgccgtttcctcgccagctcactgtcactcgtgacggcgatattatgatcctccgcacgccgattatttctgagagttactcccccgacgaaagccccagtagcgatgccaaaaatagtcaaaatatgttgggatatattgcgctggagctggatcttaaaagcgttcgcttgcagcaatataaagagatctttatttccagcgtgatgatgctgttttgtatcggtattgcgcttatttttggctggcgcttaatgcgcgatgtaaccggtccgattcgcaacatggtgaataccgtcgaccgcatccgtcgcgggcaactcgacagccgggtggaaggatttatgctcggcgagctggatatgctgaaaaacggtatcaacagcatggcaatgagcctggctgcttatcacgaagagatgcagcacaatatcgaccaggcgacgtccgatctgcgtgaaacgctggagcagatggaaattcagaacgttgagttagatctggcgaaaaagcgcgcccaggaagcggcgcgtattaaatccgagtttctggcaaatatgagtcacgagctgcgtacaccactgaatggtgttattggctttacccgcctgacgctgaaaacagaattaacaccaacgcagcgcgatcacctgaatacgattgaacgtagcgcaaataatttgctggcaattattaatgatgttctcgacttcagcaaactggaagcaggtaagctgattctggaaagtattccattcccactacgcagcacgctggatgaagtcgttactctgctggcacattcttctcacgataaagggttagaactgacgctcaatattaaaagcgacgtgcctgataacgtgatcggcgacccgctgcgattacagcaaatcatcactaacctggtggggaatgcaattaaattcaccgagaatggcaacattgatattctggtagaaaaacgtgcgctgagtaataccaaagtgcagattgaagtgcagattcgggataccggcattggtattcctgaacgcgatcaaagccgcttattccaggccttccgacaggctgatgccagtatttcccgccgtcatggtggcaccgggctggggctggtgattacacaaaaactggttaatgaaatgggcggcgatattagcttccatagccagccgaatcgcggtagtactttctggttccacattaatctcgatctgaacccgaacattattatcgaagggccatccacccagtgcctcgcaggtaagcgcctggcctatgtcgaaccaaactccgcagcagcgcaatgcacgctggatattttaagtgaaacgccgctggaagtggtttatagcccaacgttctccgcgctgcctcccgcgcattacgacatgatgttgttaggcatcgcggtgaccttccgcgagccgctaacaatgcaacatgagcgattagcgaaagcggtaagcatgaccgatttcctgatgctggcacttccttgccatgcacaagtcaatgctgaaaaactcaagcaagatggtatcggcgcgtgtctgctgaaaccattaacacctacacgcctgttgcctgccctgacggaattttgtcatcacaaacaaaacacgcttttgcctgtaaccgatgaaagtaagctggcaatgacagtcatggcggttgatgacaaccccgctaacctgaaacttatcggcgcattgctggaagatatggtgcaacatgtggaactttgcgatagcgggcatcaggcggttgaacgggcgaaacagatgccgttcgatttgatcttaatggatattcaaatgccggacatggatggcattcgggcctgcgaactcatccaccaactcccgcatcagcaacaaacgccggttatcgcggtaacggcgcatgcaatggccgggcaaaaagagaagctgcttggcgcagggatgagcgattatctggcgaaaccgattgaagaagagcgattgcataatttgttgttgcgctacaagcctggcagcggtatttcctctcgcgtcgtgacgcccgaagtcaacgaaattgtggtgaacccgaatgcgaccctcgactggcaactggcactacgccaggcagcaggaaaaaccgatttagcgcgcgatatgctgcaaatgttactcgatttcctgcctgaagttcgcaacaaagttgaggaacagctggttggagaaaacccggaaggcctggttgatttgattcataaactgcatggcagttgcggctatagcggtgtgccacgtatgaagaatctctgccaactgatcgaacaacagctacgtagcggtactaaagaagaagatttggaaccggagctgctggaactgttggacgagatggataatgtcgcgcgcgaagccagcaaaattctcgggtaatggatgtcttgtcgagtagcaatcggctttttatgacgctggtttcagattggtgacaaagtgcctgtgtttatgccggatgcggcgttaacgccttatccggcctacaaaaccaattaaattcaatgaattaaaaaatgatgtagacctgatacatagcacaacaggctattttgcgtttagcatcagtctcaaaccggctccagatagagccggttttggttttctgtcttaacgcaccatgcacgggcgcttgttatcgaacgtccagccaggaatcagatactgcattcccatcgcatcgtcacgcgcgccaagcccgtgtttctgatacagctcatgggctttcatcacttgatccatatcgatttctacacccagccccggtttttctggcacctgtaccagcccgcctttgatctcaaacggttctttggtcaggcgctgattgccttcctgccaaatccagtgcgtatcaatagcagtaattttacccggtgcagcggcggcaacatgggtaaacatcgccagggaaatatcgaagtggttgttagagtgactaccccaggtcaggccaaattcatggcacatttgcgccacacgtacgctaccttgcattgtccagaaatgcggatccgccagcgggatatcaacggattgcagggagagcgtatggcccatttgccgccagtcggtggcgatcatattggttgcagtcggtagacctgtcgcgcgacggaactctgccatcacttcacgcccggagaaaccttgctccgcaccacacggatcttctgcataagccaggctacctttcaggtatttaccgattttaatcgcttcgttcaggctccaggcaccgttaggatcgagcgtaatacgcgcctgcgggaagcgttgcgccagtgccacaatagactcggcctcttcttccccggccagtacaccgcccttcagtttgaaatcgttgaagccatatttttcatatgccgcttccgccaggcgcaccaccgcatccggcgtcatcgcttcttcatgacgcaggcgataccagtcgcaactgtcatccggctggctttgatacggcagcggcgtggctttgcgattaccgacgaagaacagataaccgagcatttcgacttcgctacgctgttgaccatcgcccagcaggcttgccacgtttacccccagatgctgccccagcagatccagcattgccgcttctatcccggtaactacatgaatagtggtacgtaggtcaaatgtctgcaaaccgcgcccaccagcatcacgatcggcaaaagtattacgcaccagcgtcagaacgtttttgtattcacccagcgttttacctaccaccagcggaatcgcatcttccagcgttttacggattttctcgccgccgggaatttcccctacgccagtgtgaccagaattatctttgataatcacaatattacgcgtaaagaacggtgcgtgtgcaccactcagattcatcagcatactgtcatgacccgccaccgggataacctgcatttcagtaacaacaggcgtcgtaaattgagaactcatatttatgtcctttttcagaatcaatgacggccgaaaacgggacgtttacggtcaaaggtccagccggggatcaggcactgcatcggacctgcgtcgttacgcgcaccgccaggcagacgtttataggcctcatgtgccttttgtacctgttcccagtccagttccacgcccagaccgggcgcatcaggaacggcaatttttccgtttttaatctccagcggattttgggtcaggcgacaatcgccctcctgccaaatccagtgggtatcgatagcggtaggattacccggtgccgccgcgcccacatgggtaaacatcgccagagagatatcgaaatggttattagaatggcagccccaggtcagcccccagtcgtcgcaaagctgcgccacacggactgcaccggaaagcgtccagaagtgcggatcggcaagtggaatatctaccgcattgagcatcaccgcatgacccatttcgcgccagttggtggcgatcatgttagtcgcgacgggcaagccggtcgcccgtcgaaattccgccatcacttcacgtccggagaagccctgttctgcgccgcatggatcttcggcataggtaagaacatcattcagccctttgcataaagaaatggcttcatcaagcagccatgcaccgttgggatcaacggtaatccgcgcatccgggaagcgtttcttcaatgcacgaacagtgtcgatttcttgctcgccaggtaacacgccgcccttaagtttgaaatctttaaagccgtagcgatcctgactggcttccgccagacgcacaacggcttcgctgttcattgctttctgatgccgcaactgataccactcatggttgcccggcgtattttccacataaggaagatcggttttggtccgatcaccgatataaaacagataaccgaggacggtaatagcctcgcgttgcttgcctggccctaacagttcgcagaccggaacattcagcgccttacctagcaggtcaagcaaagcggcttccagcgccgccacggcgttaacgcgtaattcaaaggtccaggcacctttaccgaaggtatcaaaatcggcggcctgattacctttatgcacctgctggaccactttattcagtcgcgcaacttcctggcccagaaccatcggaatagcatcgacaagcgtctgataaatcacatctccgcccggcgcttcaccaatgccggtatgcccggcgttatcggtgagtaccacaatattgcgggtgaaatatgcgttatgtgccccaccaatattaagcaacatgctgtcatgcccggccaccggaatgactttcatatcagtaataacaggactggattgtgtcgccatcttattgccccgcaacaggtttcaactcgatacgcttgatatcgcccaccagcaccaggtagctcagtaccgcgattaaggcatgaacaccaacataaatcagcgccccattaaagctgccagtcgtgccaacgatataaccaattgcgattggcgtgacgatgccagaaatgttaccgaacatgttgaacaggccaccggaaagaccgctgatctcttttggcgcggtatctgccattactgcccaacccagcgccccgatgcccttaccgaagaaggccagcgccataaagccgatgatcatccactcaacgttgacgtagttgcagaacaccatcaccatgctcagcaacatgcccattacgatcggtgttttacgcgcaatgttcaggcttcccgtgcggcgcatcagccagtcggaaataatcccacccagcacaccgccgataaaaccgcaaaccgccggaacggaagccacaaagcccgctttcagaatgctcatcccgcgtgcctgcaccagataaaccgggaaccaggtaataaagaagtaagtcagggcgttgatacagtactgaccgatataaacgccgatcatcatccgactccctagcagctgtttgatctgcccccacttcacgctgaacggcactttaactttggtgttttgctgatccatattgatcagcgcaccacccgcggcgatgtactccagctctttcttatttacccccggatgttgatttggctcgtggatgactttcaaccagataaagctgatgacaatccccagaccgcccataaagaagaagacgtgactccagcccacttcatgcgtcagccagcccataatcggcgcgaagatcaccgttgcgaagtattgagcggagttaaaaatgctcaccgccgttcccctttcctgcgccggaaaccaggccgcaacaatgcgactgttgccggggaaagatggcgcttcagcaagcccgaccaggaagcgcagcgtaaacagggcaacgataatgccgaatccactaaagatatcgacgaagccttgcagcaaggtaaacatgctccagataaagatgctccagaagtagacgcgtttactaccaaaacggtccagcaaccagccaccagggatctgcccgataacataagcccaactgaaagcagagaacacatagcccattcccacgggatcaaggccgatatctttggccatttcgctaccggcgatagagagcgtagcgcggtcgccgtagttgaaggatgtgacgataaacaacatcaccactatccagtaacgagcatttgtgcgtttttccacactgctcgcagcctgacttaaagaactcattgttgcactcctgaaaattcgcgttagccacgctcactctggactgcgacatcgccaggaaatcagaggtgacgtagggtgttttttgccgtttttataggtcgttcgccgaatacggcgcgtgtttatatctggcaatagcagtataaaaagcgcgccatagcggctcaccgtgcaacaacacaacattaatgcgttcaatgaggcccgattttggcattagccctggacggtggaatccacttcacggaaatgaaaacaagaacaagaaaggaagggttaaaacgaagaaataaagaagagtatgaaatggatcgcttgactccaggcaaacgccagtaaaaatccgcgctatgaagcagtttttactggcatttgcctgaaaagattcgattcagcaccgctaaaacgacatttaccgctcgctgaacatatcaggacaacagcgtgccccactgttcgacccacggattactttccgtttccggttccgggttctcactggcgtcaatcaacagcatttcgccaacccgctgagcgctctgttcctgcaacaaggcatcgaactgtttgccgccattgcagaaattcacataactactgtcgccgagcgcaatcacgccataacgcagattcggctggaagcccagactatctttgattccctgaaagagtggcacaatgctatcaggaaggtcgccctgcccggtcgtggacgtaaccaccagaacatacttatcctgatagggcagccagtcgcttaattcaggatcttcaaataccgttgctttgtggccctgcgcggtcagaatcgcttccgcttcttcggccactaacagactattcccgtacatggtgccgacaaaaataccaatttccgccataccgttttctccctggattaggaacttatctctccatcctgaccgcttggcgcactgaactcaaccctttcattttcaggaagcagaccgcgccagccaaattgacttaacgcctgcatccaggtgtcgtccaggcccgcgtgaatagtcagcggctcgccagtaaaaggatgcgtcaaactcaactgactggcatgtagcattaaccgctggaggccaaaatgctcagcaccgctgcgattctggcgtaaatcgccatgtttgctatcgccaataatcggatgacgcaaatgggcaagatgtcggcgaagctgatgtttgcgtccggttttcggctccagttccaccaggccgtagcgcgtggtcgggtaacgtccggtcgctaccggcatttctacggtcgccagaccgcgataatgcgtcactgctggctgcgggcctttatcttcgcgggcaaatttatcagcgattttgtccagttcttccaccagtggataatccagcaccgcttcttccatcaaccagccgcgcacaatcgcatggtaacgtttctggatttggtgctgttcaaactgttgtgccagcagccgtccggcctcgctggataatcccatcaacaacacaccagaagtgggtcggtccagacgatgagcagtaaaaacatgctggcctatctggtcacgcacggtttgcatgaccactactttctcgtcgcgatccagccagctgcggtgaaccagccagccggagggtttatttaccgcaaccagccattcatcctgatagagtatttccagcattagctcgcatcatccgcaaaaagagcatccagtttttccagctcagccagaataagcgcgcgttgcggatggtccgtcgccagcgccatttcataatagggtgcaacggcaaaagcgcccggtaacggctgtttgttatctaacaaatcgtgcattcgcgggatcagcacccactgcaaccactccagtggttccatggtgtccataaagaacggttgggtactattaaattgatgcggctggggttcatcgtttcgccagtgctgatgttcacgcagtaacgcttcaagcgcctgcaactggagacgaacgcggtcatgagtggtcataaagcaacctcaataagaaaaactgccgcgaaggatagcaggaataaaaaaagggagcactgtattcacagcgctcccggttcgtttcgcagcattccagctacttttgttgctccctgctcatccttgacaacttttcctctggccttgcggccaatcgttcatcctgaactattgcttcctgctcacaccaccccgatgtgatacttcatcctgaagtgtccctggccttcctgacccaccgaatcatcctgaccggttctcattctccatcctggaggtgtcctttaacgcgtcctgcgtcatcctcttcgcttcatccagaagcctttccctgaaacaccatcctggtgtgtcctgcagaagtgtcatcatcctgatgttcacttcgttgtctgactccctgtcgacgaagatagaatcgtctttttcgcgaagtcttacaaggcgcttacagacaatgccttaaggaaaatttcatatgaaagttaagaattaacaatcaacattttgattttaaatgaaaataacgattcttatctttttaagtattcgcttatttcctggcgatctcctacagagtctgtaagagatctctcacaaccagatggggtatttggattacagaagaggcttaagttgattaaggaattccgcaagattactggctaaatgcgtccgtttacgtgttcccagcgtctctttgcacacttcaccggagagattacacacgctgatgacctctaactcttcttccagcgtcgcgataaatagtgtgggcggcagttttagccttttctgagtcaccagatgaccaatcagattttcctgcacccgacggaagtcgtcttcactccaggtttgcagcaatgtcagtttgatatcgccaaactgcgcgtgcatatccccggcaaactgagtcgtataaaaggtatgaattgtgggttgtatcacaatatcaaaagcgcgttcaaccgcgtttacattttgttccccggtaaacggctggggttgccagtatacggcatcttcggtagtactaataatgcacggactaggaacaccgtacagttcctcacttaacggccagcttttatgctcttcatgccacgcatcgcagtagcgtgcagtaaaatctttcagggcttgtgcggtcaaatcgtccactaatttctctcttcacttaaaccagatacacttgtcgtttagtttatctggtttatgacggtgaaacatgtcttcttatgcaaaccatcaggcacttgcgggcctgactcttggaaaaagtaccgattaccgggatacctatgacgccagcctactgcaaggcgttccacgcagcctgaatcgcgacccgctgggtctgaaagcggataacctgccttttcacggtacggatatctggacgctgtatgaactttcctggctgaatgcgaaaggtttgccgcaggtcgctgtcggtcatgttgaacttgattacaccagcgtaaatctgattgagagcaagagttttaagctctatctcaacagttttaaccagacgcgttttaataactgggatgaggtgcgccagacgctggagcgcgacttaagcacttgcgctcagggtaagattagcgtggcgttatatcgtcttgatgaactggaaggccagccgataggtcattttaatggcacttgcattgatgaccaggatatcactatcgataactatgaattcactactgactatctggagaatgccacctgtggtgaaaaagtagtggaagagacgcttgtcagccacctgctgaaaagtaactgcctgatcacccatcaaccagattggggtagcctccaaattcagtatcgtggacgccaaattgacagagaaaaactgctgcgttacctggtcagtttccgtcatcacaacgagttccacgaacagtgcgtggaacgcatctttaatgacctgttacgcttctgccagccagaaaaattgagcgtttacgcacgttatacccgtcgtggcggtctggacattaacccgtggcgcagtaatagcgattttgtcccaagcaccacaagactggttcggcaataaatttttctcaattttgcgtgctggattcacgcagaaggttgtgaaaggtcatcaggcagggctattgtaatcaaagggaatgacgatattcgtcccataaggagtttttcttgattacacatattagcccgcttggctccatggatatgttgagccagctggaagtggatatgcttaaacgcaccgccagcagcgacctctatcaactgtttcgcaactgtagtcttgccgtactgaactccggtagtttgaccgataacagcaaagaattgctgtctcgttttgaaaatttcgatattaacgtcttgcgccgtgaacgcggcgtaaagctggaactgattaatcccccggaagaggcttttgtcgatgggcgaattattcgcgctttgcaggccaacttgttcgcggtcctgcgtgacattctcttcgtttacgggcaaatccataacaccgttcgttttcccaacctgaatctcgacaactccgtccacatcactaacctggtcttttccatcttgcgtaacgctcgcgcgctgcatgtgggtgaagcgccaaatatggtggtctgctggggcggtcacagtattaacgaaaacgagtatttgtatgcccgtcgcgtcggaaaccagctgggcctgcgtgagctgaatatctgcaccggctgtggtccgggagcgatggaagcgccgatgaaaggtgctgcggtcggacacgcgcagcagcgttacaaagacagtcgttttattggtatgacagagccgagcattatcgccgctgaaccgcctaacccgctggtcaacgaattgatcatcatgccagatatcgaaaaacgtctggaagcgtttgtccgtatcgctcacggtatcattatcttccctggcggtgtgggtacggcagaagagttgctctatttgctgggaattttaatgaacccggccaacaaagatcaggttttaccattgatcctcaccggcccgaaagagagcgccgactacttccgcgtactggacgagtttgtcgtgcatacgctgggtgaaaacgcgcgccgccattaccgcatcatcattgatgacgccgctgaagtcgctcgtcagatgaaaaaaagcatgccgctggtgaaagaaaatcgccgtgatacaggcgatgcctacagctttaactggagtatgcgcattgcgccagatttgcaaatgccgtttgagccgtctcacgagaatatggctaatctgaagctttacccggatcaacctgttgaagtgctggctgccgacctgcgccgtgcgttctccggtattgtggcgggtaacgtaaaagaagtcggtattcgcgccattgaagagtttggtccttacaaaatcaacggcgataaagagattatgcgtcgtatggacgacctgctacagggttttgttgcccagcatcgtatgaagttgccaggcagtgcctacatcccttgctacgaaatctgcacgtaatctccgctcccccggtgacgtttgttgccgggttttctcgtttttggtcacttactcatcaactcatttcatttgttatatgaatgtttctcaccaccctcacgcgacaaatatcatcacagttaatatgtcatacaatttatgttgcaacgcaaacgtttccctattttcataaaccgtattttatcgctatgaaaaagaaattatcgccatgattaactaaaagtattgattttttcagttcaacctacatatattgcgcgccccggaagaagtcagatgtcgtttaatgggcaaatattgcccttaaattctcttttacttttgatttacagagtaaagcgttgggataatctatcttccaagtagattattgtatttgagatcaagatcactgatagatacataacttgtgtgtatctttccgccctcaaattattacggcggtaaatgattaagccatcgccgatagacagatttcatttttacggtcaggcaccttcccgggctgaactggctaaaagctgaattatttgcattcctccaggagaaatagatggaaacgactcaaaccagcacgattgcgagcaaagactctcgtagtgcctggcgcaagacagacaccatgtggatgctgggcctttacggcacggcaatcggcgcgggcgtgctgttcctgccaatcaacgccggtgttggcggtatgatcccgctgatcatcatggctatccttgcgttcccgatgacgttttttgctcaccgcggcctgactcgcttcgtactgtctggtaaaaacccgggcgaagacatcaccgaggttgtagaagaacactttggtattggcgcaggtaaactgattaccctgctctacttcttcgctatctacccgatcctgctggtttatagcgtggcaatcaccaataccgttgaaagcttcatgtctcaccagctgggtatgacgccaccgccgcgtgcgattctgagcctgatcctgatcgtgggtatgatgaccatcgttcgcttcggtgagcagatgatcgttaaagcgatgagtattctggtattcccgtttgttggcgtactgatgctgctggctctgtacctgatcccgcagtggaacggcgctgcactggaaacgctgtctctggacactgcatctgcaaccggaaacggtctgtggatgaccctgtggctggcaattccggtaatggtgttcagcttcaaccactctccgatcatctcttctttcgccgttgcgaagcgtgaagagtacggcgatatggcagaacagaaatgcagcaagatcctggcattcgcacacatcatgatggtgctgaccgtaatgttcttcgtcttcagctgtgtactgagcctgactccggcagacctggctgcggctaaagagcagaacatcagcattctgtcttacctggctaaccactttaacgcaccggttatcgcgtggatggctccgattatcgcgattatcgctatcaccaaatccttcctcggtcactacctgggcgcacgtgaaggcttcaacggtatggtgattaaatctctgcgtggtaaaggtaagtctatcgaaatcaacaagctgaaccgtatcactgcgctgttcatgctggtaacgacctggattgttgccaccctgaacccgagcatcctgggtatgattgaaaccctgggcggtccaatcatcgcgatgatcctgttcctgatgccgatgtacgcaattcagaaagtaccggcaatgcgtaagtacagcggtcacatcagcaacgtattcgttgtcgtgatgggtctgattgcaatctccgcaatcttctactctctgttcagctaagtcctttcgcgccgctttcgggcggcgcttcctccgttttaacgcgatgtatttcctatgattagcgtattcgatattttcaaaatcggcattggcccttccagttctcataccgttggaccaatgaaagcgggtaaacaatttaccgacgatctgattgcccgtaacctgcttaaagacgtgacccgcgtggtggttgacgtgtacggcagcctctctctgaccggtaaaggccaccacactgatatcgccattattatgggcctggcgggtaacctgccggataccgtggatatcgattccatccccagttttattcaggatgtgaatactcatggtcgcctgatgctggcaaacggtcagcatgaagtggagttcccggttgatcagtgcatgaacttccacgccgacaacctttctctgcatgaaaacggtatgcgcattaccgcgctggcgggcgataaagtcgtttacagccagacttactactctattggcggtggctttatcgttgatgaagagcattttggccagcaggatagcgcaccggttgaagttccttatccgtacagtagtgcagccgatctgcaaaaacattgtcaggaaaccgggctgagtctctctggcctgatgatgaaaaacgagctggcgctgcacagcaaagaagagctggaacagcacctggcgaacgtctgggaagtcatgcgcggcggtattgagcgcggtatttccaccgaaggcgtgttgcctggcaaactgcgcgttccacgccgtgctgcggcactacgccggatgctggtcagccaggataaaaccaccactgacccgatggcggttgttgactggatcaacatgtttgcactggcagtgaacgaagagaacgctgctggcggtcgcgtggtgactgcgccgactaacggtgcgtgcgggattatcccggcagttctggcgtactacgacaagtttatccgcgaagtgaacgctaacagtctggctcgttacctgctggtagccagcgccattggttctctttataagatgaacgcgagcatttctggtgctgaagtgggttgccagggtgaagttggcgtggcgtgcagtatggcggcggctggtctggcagaactattaggcgcaagcccggcgcaggtgtgcatcgcggcggaaatcgccatggagcacaacctcggtctgacgtgtgacccggtcgccggacaggtacaggtgccatgcatcgagcgtaacgccattgcggcagtaaaagcggtgaacgccgcacgtatggcgctgcgccgtaccagcgagccgcgcgtctgcctcgataaagttatcgaaaccatgtacgaaacaggtaaagatatgaacgccaagtaccgcgaaacctctcgcggcggcctggcaatgaagatcgttgcctgcgattaatcgctctccaaaggcctcgttttgcgaggcctcttcccgatttctcatccagccgtagcctgttccggcatcgaatgttacccttatcgcctgatctttaagggggttatcgtggctgttcatttgcttattgtcgatgcactgaatcttattcgtcgcattcatgccgttcaggggagcccctgtgtcgaaacctgccagcatgcgctcgatcagctcattatgcacagccagccaacccacgcggtcgccgtttttgatgatgaaaaccgcagtagcggctggcgtcatcagcgtttaccagattacaaagcgggtcgaccgccaatgccggaagagttgcacgacgagatgcctgcattacgcgccgcctttgagcaacgcggcgtcccgtgctggagtaccagcggcaacgaagccgatgacttagccgccacgctggcggtcaaagtgacacaggccgggcatcaggcaacgattgttagcacagataaaggctactgtcagttacttagtccgacattacgtattcgtgattacttccagaaacgttggctggatgcgccatttatcgataaagaatttggcgttcaaccgcagcagttgcccgattactggggacttgcggggatcagcagtagtaaggtaccgggtgttgcgggaatcggaccaaaaagcgccacgcagctgctggtcgagtttcagagtctggaagggatatatgagaatctggatgcggttgccgaaaagtggcgcaaaaaattagaaacccataaagagatggcgtttctgtgccgcgatattgcccgcttacaaaccgatttgcatatcgacggcaatttacagcaattgcggttggtacggtaacggcgagccggatacgccgcaaacgtcgtatccggcattatcacatcagcgcatttaccaggcggtatggtaaagctctacaatatcctcaagcgttgcttcacgcgggttgccaccggtacaaacatcatccagtgccgcctgcgccagtgccggaatgtcttccttgcgtacaccaacatcacgcaaatgtggcggaataccgacatcacggttgagagcaaacaccgcttcaacagcggcattacgcgcctcttccaggctcataccttccactttcacgcccataacgcgcgcgatatcgcggtacttctcaccggtaaagtcagcgttataacgcatgacatgcggtaacaggatggcgttcgcaacaccgtgtggagtgttataaaacgcgcccagtggatgcgccataccatgcaccaaccctaacccaacattgctgaagcccatacccgcaacatactgcccgagcgccatttcttctccggcatccttatcaccagcaacgcttcctcgcagcgccccagcaatgatttcaatcgctttaatgtgcagtgcatcggttagcgcccacgcgccacgggtaatatacccctcaatagcatgagtgagcgcatcgacacccgtcgcagctttcagcgctggaggcataccatccatcatgtcagcgtcaataaacgccacctgcgggatatcatgcggatcaacgcaaacaaacttgcgccgtttctcttcgtcagtgatcacgtagttaatggtcacttctgccgcagtacctgctgtggtaggaattgccagaatcggtacactgggtttattggtcggggaaagcccttccaggctacgcacatcggcaaactccgggttgttgctgataatgccaatcgctttacaagtatcctgtggagaaccaccaccaatagcgatcaggtaatccgcgccgctattctggaatacaccgagcccttctttgacgacagtaattgttgggttgggcactacgccgtcgtaaatcgcccatgccagccctgcagcatccatcttatcggtcactttcgccaccacgccgcattgcaccagcgttttatcggtgacgatcagcgccttctgataaccacggcgtttcacctcatcggttaaagccccaacagcaccccgaccaaaccatgccgtttcgttcagaatcattctgttagccatcatccttctccttgttgctttacgaaattactcttcaattcgtaacccataggttttgaatttctccagcactacggcaatctcttcatcgctcagcactggcaccgggtccgtaatcgccagggtcgtcaggtaaagttgcgccagcacttcaacttcatgcgccagccataacgctttttccagattcacctcacaagcgataagcccatgatgttgtaacaaagttgccttacgatttttgagagccagcgcaacatgttcagaaagttcgcgtgttccaaaggtcgcataaggcgcgcaaggaatagaattaccgccagccgccgcaatcatgtagtgaatagcggggatgcttcggttaagaatggaaactgccgtgcaatgaacggcatgattgtgaacaaccgcgttggcatccggtctgctttgataggctgccatatggaaacgccattcgctactggggagctttccttcctcatgtttaccgttgccatcaataaagacaatatggctctccgtcagtttttcatatggaatgcctgtaggcgtaatcagcatcccatcctgataacgtacactgacgttccccgctgtcccctggttcagtcccaggcgggtcatttccaggcaagtgtcaataatctgacgagcaagtttatttcgttccattagctacctctctctgattcaaaacagggcaataatgttgttcctttcacactattgaattagccgtttaattacccaccatcttcttcctgattaacaagaaagaaattcacaagcttatattttgtgacctggttcaactaatcacagtaaataactgcaagttctctttttataaccccattaaaaatgaccgctcttaaaaatatttatcaaaacggtcatttttctattcctccaagcccggaatgaccgttttcggcacaaacaattaatacggtcatctgatttgtgttttttatgatttattttctgaaacgggcatgaaatttcgattattaaagtgatggtagtcacataaagtcaccttctagctaataagtgtgaccgccgtcatattacagagcgttttttatttgaaaatgaatccatgagttcatttcagacaggcaaatattcactgatatgaagcccgaactcgctggttttgcacttttgaaaacataaccgattacgtgcttaagcttctgaacctaagaggatgctatgggaaacacaagtatacaaacgcagagttaccgtgcggtagataaagatgcagggcaaagcagaagttacattattccattcgcgctgctgtgcagtctgttttttctttgggcggtagccaataaccttaacgacattttattacctcaattccagcaggcttttacgctgacaaatttccaggctggcctgatccaaagcgccttttactttggttatttcattatcccaatccctgctgggatattgatgaaaaaactcagttataaagcagggattattaccgggttatttttatatgccttgggtgctgcattattctggcccgccgcagaaataatgaactacaccttgtttttagttggcctatttattattgcagccggattaggttgtctggaaactgccgcaaacccttttgttacggtattagggccggaaagtagtggtcacttccgcttaaatcttgcgcaaacatttaacagctttggcgcaattatcgcggttgtctttgggcaaagtcttattttgtctaacgtgccacatcaaagccaagacattctcgataaaatgtctccagagcaattgagtgcgtataaacacagcctggtattaagcgtacagacaccttatatgatcatcgtggctatcgtgttactggtcgccctgctgatcatgctgacgaaattcccggcattgcagagtgataatcacagtgacgccaaacaaggaagcttctccgcaagcctttctcgcctggcgcgtattcgccactggcgctgggcggtattagcgcaattctgctatgtcggcgcacaaacggcctgctggagctatttgattcgctacgctgtagaagaaattccaggtatgactgcaggctttgccgctaactatttaaccggaaccatggtgtgcttctttattggtcgtttcaccggtacctggctcatcagtcgcttcgcaccacacaaagtcctggccgcctacgcattaatcgctatggcactgtgcctgatcagtgccttcgctggcggtcatgtgggcttaatagccctgactttatgcagcgcctttatgagcattcagtacccaacaatcttcagcctgggcattaagaatctcggccaggacaccaaatatggtagctccttcatcgttatgaccattattggcggcggtattgtcactccggtcatgggttttgtcagtgacgcggcgggcaacatccccactgctgaactgatccccgcactctgcttcgcggtcatctttatctttgcccgtttccgttctcaaacggcaactaactgaacatattttccgaataaagtgaggaatctgtaatgaaaaaaatcagcttaccgaaaattggtatccgcccggttattgacggtcgtcgcatgggtgttcgtgagagccttgaagaacaaacaatgaatatggcgaaagctacggccgcactgctgaccgagaaactgcgccatgcctgcggagctgccgtcgagtgtgtcatttccgatacctgtatcgcgggtatggctgaagccgctgcttgcgaagaaaaattcagcagtcagaatgtaggcctcaccattacggtaacgccttgctggtgctatggcagtgaaaccatcgacatggatccaacccgcccgaaggccatttggggctttaacggcactgaacgccccggcgctgtttacctggcagcggctctggcagctcacagccagaaaggcatcccagcattctccatttacggtcatgacgttcaggatgccgatgacacaagcattcctgccgatgttgaagaaaaactgctgcgctttgcccgcgccggtttggccgtcgccagcatgaaaggtaaaagctatctgagcctgggcggcgttagcatgggtatcgccggttccattgttgatcacaacttctttgaatcctggctgggaatgaaagtccaggcggtggatatgaccgaactgcgtcgccgtatcgatcagaagatttacgacgaagccgaattggaaatggcactggcctgggctgataaaaacttccgctatggcgaagatgaaaataacaaacagtatcaacgtaatgccgagcaaagccgcgcagttctgcgcgaaagtttactgatggcgatgtgtatccgcgacatgatgcaaggcaacagcaaactggccgatattggtcgcgtggaagaaagtcttggctacaacgccatcgctgcgggcttccaggggcaacgtcactggaccgatcaatatcccaatggtgacaccgccgaagcgatcctcaacagtagttttgactggaatggcgtgcgcgaaccctttgtcgtggcgaccgaaaacgacagtcttaacggcgtggcaatgctaatgggtcaccagctcaccggcaccgctcaggtatttgccgatgtgcgtacctactggagtccagaagcaattgagcgtgtaacggggcataaactggatggactggcagaacacggcatcatccatttgatcaactccggttctgctgcgctggacggttcctgtaaacaacgcgacagcgaaggtaacccgacgatgaagccacactgggaaatctctcagcaagaggctgacgcttgcctcgccgctaccgaatggtgcccggcgatccacgaatacttccgtggcggcggttactcttcccgcttccttaccgaaggcggcgtcccgttcaccatgactcgtgtcaacatcatcaaaggcctgggaccggtactgcaaatcgcggaaggctggagcgtggaattgccgaaggatgtgcatgacatcctcaacaaacgcaccaacagtacctggccaaccacctggtttgcaccgcgcctcaccggtaaagggccgtttacggatgtgtacagcgtaatggcgaactggggcgctaaccatggggttctgaccatcggccacgttggcgcagactttatcactctcgcctccatgctgcgtatcccggtatgtatgcacaacgttgaagagaccaaagtgtatcgtccttctgcctgggctgcgcacggcatggatattgaaggccaggattaccgcgcttgccagaactacggtccgttgtacaagcgttaatacattactccctgatgtgatgcccggtcgctccggctaccgggcctgaacaagcaagagtggttagccggataagcaatgttatccggctatattgcaggagcgattatgaaacaagaagttatcctggtactcgactgtggcgcgaccaatgtcagggccatcgcggttaatcggcagggcaaaattgttgcccgcgccagtacgcctaatgccagcgatatcgcgatggaaaacaacacctggcaccagtggtctttagacgccattttgcaacgctttgctgattgctgtcggcaaatcaatagtgaactgactgaatgccacatccgcggtatcgccgtcaccacctttggtgtggatggcgctctggtagataagcaaggcaatctgctctatccgattattagctggaaatgtccgcgaacagcagcggttatggacaatattgaacggttaatctccgcacagcggttgcaggctatttctggcgtcggagcctttagtttcaatacgttatataagttggtgtggttgaaagaaaatcatccacaactgctggaacgcgcgcacgcctggctctttattagcagcctgattaaccaccgtttaaccggcgaattcactactgatatcacgatggccggaaccagccagatgctggatatccagcaacgcgatttcagtccgcaaattttacaagccaccggtattccacgccgactcttccctcgtctggtggaagcgggtgaacagattggtacgctacagaacagcgccgcagcaatgctcggcttacccgttggcataccggtgatttccgcaggtcacgatacccagttcgccctttttggcgctggtgctgaacaaaatgaacccgtgctctcttccggtacatgggaaattttaatggttcgcagcgcccaggttgatactagcctgttaagtcagtacgccggttccacctgcgaactggatagccaggcagggttgtataacccaggtatgcaatggctggcatccggcgtgctggaatgggtgagaaaactgttctggacggctgaaacaccctggcaaatgttgattgaagaagctcgtctgatcgcgcctggcgcggatggcgtaaaaatgcagtgtgatttattgagctgtcagaacgctggctggcaaggagtgacgcttaataccacgcgggggcatttctatcgcgcggcgctggaagggttaactgcgcaattacagcgcaatctacagatgctggaaaaaatcgggcactttaaggcctctgaattattgttagtcggtggaggaagtcgcaacacattgtggaatcagattaaagccaatatgcttgatattccggtaaaagttctcgacgacgccgaaacgaccgtcgcaggagctgcgctgttcggttggtatggcgtaggggaatttaacagcccggaagaagcccgcgcacagattcattatcagtaccgttatttctacccgcaaactgaacctgaatttatagaggaagtgtgaaatgctgaaaacaattagcccgttaatttctcccgaactattgaaagtgctggcagagatgggacatggagatgaaattattttttccgatgctcactttcccgcccatagcatgggaccgcaggtgatccgcgctgatggcctgttggtgagcgacttgctccaggcgattatcccgttatttgaactggacagttatgcaccgccgctggtgatgatggcggcggtagaaggtgacactctcgatcctgaagtagaacgacgttaccgtaatgcgcttagtctacaagccccgtgtcctgacatcatccgcatcaatcgttttgcgttttatgaacgggcgcaaaaagcctttgcgatcgttatcacaggcgaacgagcgaagtacgggaatattcttttaaaaaaaggggtaacaccgtaatctcataccggtacgcccgcatgacgcgggcggttatcgaatgatggggtgaaaaatatgaaagcggcacgccagcaagcgatagtcgacctgctgctgaaccataccagcctgaccacggaagctctctctgaacagctaaaggtcagtaaagaaaccattcgtcgcgatctcaatgaattacagacgcagggtaaaattctgcgcaatcatggacgcgctaaatatatccaccgtcaaaatcaagacagtggcgatccctttcacatcaggctgaaaagccattatgcgcataaagcagatatcgcgcgcgaggcgctcgcgtggattgaagaagggatggtgatagccttagacgccagtagtacttgctggtatctggcacgccagttgcctgacatcaacattcaggtcttcaccaatagccatccgatttgccatgaactcggtaaacgcgaacgcattcaactgatcagttccggcggcacacttgagcgcaaatatggctgttacgtcaatcccagcctgatttcccaacttaaaagcctggaaatcgatctgtttattttttcttgtgaagggatcgatagcagcggcgcactgtgggactccaatgcgatcaacgctgattacaaaagcatgctattaaaacgtgccgcgcaaagcttgttattgattgataaaagtaaatttaatcgtagtggggaagcccgcatcgggcatctggatgaggtaacgcacattatttctgatgagcgccaggttgcaacttctttggtaacagcctgacggaaagggtagcaggccggagacgacgccccggccttgcctgttatcgctcgtcgcgacgaccacccaccgcagcccagatgcggcggacgtgcaccgtcacttcttcgcgatcgtgatacaactgccgcgcctgaatctgagcatttatgccatgttcatcaagctgtgcctgaatatacgccagattgtgactcacttcttcgtagcgttttttcatcggcagtttgaggttgaaaatggtttcacggcaccagccattaaccagccactgtgccatcaatgccgcaactttcgccggtttttcaaccatatcgcataccatccaggagatattgctgcgcgtcggacggaatttgaaaccgtcttcccgcagccacgtcacctgtccggtatccatcagactttgcgccatcgggccgttgtcgacggaataaacccacatgttgcgcttcaccagttggtaggtccagccgccagggcaagcgcctaaatccaccgcccacatcccgttcgccaggcgttcatcccactcatccgcaggaataaacacatgaaatgcctcttccagtttgagcgtggaacgactcggcgcatctgccggaaatttcaggcgcggaatgcccatatagaacgggctattattgttgctgtaactgtaaccggtatagcagcagcctggtgcaataaagaatacatgcacaaccggacgcttcggcgtttcatagttcgccagcaccccggcatcgcgcaaggcagcgcgtagcggaacagtaaatttacggcagaatttcagtaactctttgctttcgttggtatcggcaacttcaacacgcagttcaccgcccttctctactacgccctgtaacatgccgacaatgggggtaatacgatcttctggcggcaaatgctgcaggagttcccccaccacaaaccactggcgggcaaaaattaaactactgaacggcagctcacggattaacttatcgccatcatcaggttgataacattcataaatgacataacccgcattctctttcacgcgggcaaaaccgaaaatttcccgctggccggctttatcggtaatttctgcggcgcactctttttcaaagcccggacggcacagcaatacaaccttattcatgacttacgcccttgcgctttaaacggatagcaccaactaacattaacgcccagcccgcgaggaagctcacgccgccaaccggagtgacaaacgcccacaaacgcagatgggacagcgccaggcaataaaggctgccgctgaacaacaccgtgcctaacgcgaggaaaacgctactccagtaaaaccagatactgatgcgacgctgcattgccaccgccagacctaagatcgccagcgtatgaaacgcctggtattcgaggccggtctggatccagcccatctcaacggcccccatggttttacttaacacatgcgcgccaaaagcgcccagagccacaaaaatgaagccgctaatggcggcgaaaatcagcataaaacggctggtcatggtcgtaccctacgtaaattattgttcataacgaaagcggaatttttcttgttcagcagcggctttcgccaggatccattggcgaaaggcggctattttacccagttctgcctgactgtcatgacaaaccagataaaaagcatttttactgaccagaacatcattaaacgggcaaacaagacgtccggcctcgatttcagattgcgccatcacgttatttgccagcgccactccctgcccgtggatagccgcttgcagcaccatggcgctatggctaaaaattggcccttgctgaacgttgatatgatttaaccccaactgtcgggtatatgtctgccagtcacggcggctagcatcatgtaataacgtatgtttagccagatcttccggtgtcttcaagggtttttcgccagtcagcagtagcgggctacacaccggcaataaatattcggcgtacagtttttccacccgtagccccggccagttgccccgaccataaaatatcgccacatcaacatcatccgccagcttatcttcctgacgatcaaccgcctggattcgaacgtcaattcccggataagcactattaaagctggaaagtcgcggaaccaaccaatgaatggcgaaactggggagtaaactgaccgtcaacgcccccttggcgctacgggcctggagtttacgcgtcgcttcggttaattggctaaatatctctttgatatcgaggaaatagctttgcccttcctcggtcagcaggagactacgattacggcggcggaacagttttagccccaaaaaatcctcaagagacttgatttgatgacttactgcggcttgggtcacaaaaagctcttctgctgcgcgagtgaaacttaaatggcgtgctgcggcatcaaaaactcgtaaggcatttagcggtggtaatcgtttagacatggctattaaactttgatgttaaatgaatttaacaattagatcacactatgtaacctattagtttttttaatctgagccattataaattgtccgttgagcttctaccagcaaatacctatagtggcggcacttcctgagccggaacgaaaagttttatcggaatgcgtgttctggtgaacttttggcttacggttgtgatgttgtgttgttgtgtttgcaattggtctgcgattcagaccatggtagcaaagctaccttttttcacttcctgtacatttaccctgtctgtccatagtgattaatgtagcaccgcctaattgcggtgcttttttttaccttgcgatcgcgaattactgatccagttcgaccatctctttcacgtcagtacggttgatctgctgtttgttgccattagcgtctttatagctaatcataccggtatcgttatcagtctgtggtttgccgtcagagacgatggtacgtccgtcattggtgtgcatcacatagttgctaccggaacaggcgctcagggcaaaagtcagcatacaggcagaaataattgcggcagtctttttcatcatcttctccttaaagcgattaataaatcttaatagtattgattaacaggctaaaattaacgcctaacactattcagcatatgttacttacgcggcttcgccaggatatccagataattctgatggttagcactctccttgtatcaaagtgaattttgcgtcacgatcggtgcatcaagccgaggagtaccatgaacgtttttaatcccgcgcagtttcgcgcccagtttcccgcactacaggatgcgggcgtctatctcgacagcgccgcgaccgcgcttaaacctgaagccgtggttgaagccacccaacagttttacagtctgagcgccggaaacgtccatcgcagccagtttgccgaagcccaacgcctgaccgcgcgttatgaagctgcacgagagaaagtggcgcaattactgaatgcaccggatgataaaactatcgtctggacgcgcggcaccactgaatccatcaacatggtggcacaatgctatgcgcgtccgcgtctgcaaccgggcgatgagattattgtcagcgtggcagaacaccacgccaacctcgtcccctggctgatggtcgcccaacaaactggagccaaagtggtgaaattgccgcttaatgcgcagcgactgccggatgtcgatttgttgccagaactgattactccccgtagtcggattctggcgttgggtcagatgagcaacgttactggcggttgcccggatctggcgcgagcgattacctttgctcatagtgccgggatggtggtgatggttgatggtgctcagggggcagtgcatttccccgcggatgttcagcaactggatattgatttctatgcttttagtggtcacaaactgtatggcccgacaggtatcggcgtgctgtatggtaaaagtgaactgctggaggcgatgagcccctggctgggcggcggcaaaatggttcacgaagtgagttttgacggcttcacgactcaatctgcgccgtggaaactggaagctggaacgccaaatgtcgctggtgtcataggattaagcgcggcgctggaatggctggcagattacgatatcaaccaggccgaaagctggagccgtagcttagcaacgctggcggaagatgcgctggcgaaacgtcccggctttcgtagtttccgctgccaggattccagcctgctggcctttgattttgctggcgttcatcatagcgatatggtgacgctgctggcggagtacggtattgccctgcgggccgggcagcattgcgctcagccgctactggcagaattaggcgtaaccggcacactgcgcgcctcttttgcgccatataatacaaagagtgatgtggatgcgctggtgaatgccgttgaccgcgcgctggaattattggtggattaatgacaaacccgcaattcgccggacatccgttcggcacaaccgtaaccgcagaaacgttacgcaataccttcgcaccgttgacgcaatgggaagataaatatcgccagttgatcatgctggggaaacagcttccggcattgccagacgagttaaaagcgcaggctaaagagattgccggatgcgaaaaccgcgtctggctgggatatacagtggctgaaaacggcaaaatgcatttctttggcgacagcgaagggcgcattgtgcgcggcctgctggcggtgttgttgactgccgttgaggggaaaaccgccgccgagttgcaggcacagagtccactggcattgtttgatgagctgggattacgtgcgcagcttagcgccagtcgcagccaggggttaaatgcgttaagcgaggcgattatcgctgcgacgaagcaggtttaagcacagaaccgggtcggataagacgttcgcgtctcatccgacctgattgtttaaccctgacgcgccgctttcgccatcatcttcttcagcgcatgagaaaccgcaacaaacccaaaggtggcggtcaccatcgttgccgcgccaaatccagatgcacaatccatccgcttcggcccttctgccgtggctttcatcgcacacaccgtaccgtcactctgcgggtacaccagcgcttcagtagaaaacacgcaatccacgccgagcttacctttactgtttttcactacgccaaaatcgcttttcaggcgctcgcgcaacttcgccgccagcgggtcctgaatcgttttcgccagatcggtaacctgaatctgcgtcggatcaatctgcccacccgcgccaccggttgtgaccagtgggattttattgcgccgacaataagcaatcagcgccgctttgggccgtacactatcaatggcatcaatcacgtagctataacccacgctcatatactgcgctacgttatccggcgtcacgaaatcatccaccaccgttacacggcactccgggttaatctggcgaatacgctccgccataacttccgcttttgccagcccaacgttatcgcgcagggcatgaatttgccgattggtattggtgacgcacacatcatccatatcgataagcgtgattgcgccaatccccgtgcgcgccagcgcttccgccgcccaggaaccgacaccaccgataccaaccacacaaatatgcgcgtcagcaaacagttgcaacgctttttcaccatacagacgcgctgtgccaccaaaacgctgacgccatgcatcactaattaccacagacatagcacctcagaattaaaaagggcgaggttatccctcaccctaaacgcataaatgcctgatgcgctacgcttatcaggcctacataactcctgcaatattttggatttgcatgatttgtaggccggataaggcgttcacgccgcatccggcatgaacaacgcgcacttagtcaataatcaggatgtgaggttacccctcaccctgtcatatccgtaaaaacggcatacagaatatcacatcagccgctaaagacgttacctgcgcccggggcggttttcagcacccagacacgtccatagtggttgtaccaacctgcgcggtgtccggcttccggcccgatcccttgatagatatcgaagtgttggcctttgattgcaccaccgacatccagcgccaccatcagacgcagttcgtactgaccattaaatttgccgttattatccagcaacggcacttctgccagcaaggtagtacctggcggaataatggaacgatcagaggcaacactcgcgcgaccaaccagcggcaccgcacttgcccctttcaccggagcaaaagattgcggtttaaagaagacgaaagacgggttctgttccagcagctcgcgaacctcggcttcactgtgtgtttcgccccagtgacgaatcgcctgcatgctcatatcttcttttttcacttcgccacggtcgatcagcaccttaccaatgctgcgataggcatgaccgtttttccctgcatagctgaaaaagttaagcggactgccatcaccaaagtcgatatacccactaccctgcacatccataatgaagttatccatcagggagttactgtaagcgagaatatatttatcactcaatgcccccgcgtagatctccgcacgagacggcagacgaccacgttttggcggcatacggtaaataggatactggaactcgccctggcgggtatggcgcgcctgaattaccggcgtgtaataaccggtaaactgcacgttaccatagttgtcggcaccttccatctgccaggcatcaatgccgaactggcgcatattgcgggtatcaccgcctgcgcgcagccactcttgcaccgcgttataaacattactctggttgccatacagacgcggactgctattacggatatggttaatttgctcggcaaaatcaccggcgttaatcggcgcgccaacggcatctggctggttcaccagagagaaaggctgggtaaatttcccgtctttatattgctgtccgcgatcggttggtttggaagagcaggcggcaagcattgccacaaccgtgcccataagaaggtactttacccaacgtcctttcattgttctcttcttcaggttaaaaaataaggcgcaacgaagataacaaaccgccgcgtttaatgaaatgagcagcctctccctgacgcaaattttgcacaaaaaataggctttagtgatttgtttttgttcaaaatcatgccaaatccgtgatcggggtaaaaaaaaggttgcatgaaaacgcgagcggagtatagtgcgcatccacggacgcggggtggagcagcctggtagctcgtcgggctcataacccgaaggtcgtcggttcaaatccggcccccgcaaccaattaaaatttgatgaagtaaagcagtacggtgacgcggggtggagcagcctggtagctcgtcgggctcataacccgaaggtcgtcggttcaaatccggcccccgcaaccaatcaaatttgatgaagtaaaagcagtacggtgacgcggggtggagcagcctggtagctcgtcgggctcataacccgaaggtcgtcggttcaaatccggcccccgcaaccaattattgaacaccctaacgggtgtttttttgtttctggtctcccataaaaaagcgccattcagcgcctttttatcatccccttctcgccagcgtcgccccatcggcaaaatacgctttaatccccgcaagaatagactccgcaacttcctgctggaaagtcgccgttttcagtttacgctcttcctcaacgttactgataaacgccgtttcgaccagaatggagggaatatctggtgcctttagtacggcaaacccggcctgttcaacttgatttttatgcagcttattgattttaccgagcttattcagtaccgctttaccaaacttcaggctgtcggcaatggtcaggctctgtaccatatcgaacatggtgtggtcgacatagcggtcaccgcttttgctcacgccaccaatcaagtcgctggcgttctgggtttgtgccagatattttgccgcagtactggttgcacctttggtactgagcgcaaacacagaggaaccgctcggctgacgactggtaaaggcgtcggcatggatagagacaaacaggtcagcacgctgtttctgggcttttgctacgcgcacttgcaatggaatgaagatgtcttcattgcgcgtcatgtacaccttcatattgccctctttctcgatcagagagcgcaaacggcgagctatttgcaataccacatctttttcgcgcgttttgtatttccccaccgcaccggagtcttcgccaccgtggccagggtcaagcataatgacaatcggacgatcgcgccctgctttacccggttgtggaccactttgcgctggcggcacctgcttttcgaggtcgcctttgttgtaatcctccagcagcgccagcagcgggtcctgcatatcctgtgcattggccggatagaggtccatcaccagacgctctttaaacccggcgaccggcgcaagggcaaacagctgcggttttacgttttgctttaattcaaaaaccatccgtacggtttgcgggtcaaattgcccgacgcgcgcgctcttgatgaacgggtcgtctgcacgaatttgtgccgccatccccttgagtacgctgttcaggtttacatcttcgatatccaccaccacgcgttcagggttactcaacgcgaactgcttatatttcagctgacgattactttccaccgtcacgcgggtgtagctggacgcaggccagacgcgcaccgccacgacctggctgaccgcagccagactgacctgacttacgctcaatagccacatggcacccgcgccttgcagtaaacgacgacggctgattgcagtgttggatccactcatgcctctcccgagcaaaagaaatctaagctgtgtaacaagtaaacgactaatttgaccggaaactttagcgaaagacgcataatctgtcatctaataaacggtaaacattctttttatattcacggcattactgataaaaaagtcgctctcgcataaaatttacacttgcaccctgcgaaaaaacagaataaaaatacactaatttcgaataatcatgcaaagaggtgtgccgtggtaaaggaacgtaaaaccgagttggtcgagggattccgccatagcgttccctatatcaatacccaccggggaaaaacgtttgtcatcatgctcggcggtgaagccattgagcatgagaatttctccagtatcgttaatgatatcgggttgttgcacagcctcggcatccgtctggtggtggtctatggcgcacgtccgcagatcgacgcaaatctggctgcgcatcaccacgaaccgctgtatcacaagaatatacgtgtgaccgacgccaaaacactggaactggtgaagcaggctgcgggaacattgcaactggatattactgctcgcctgagcatgagtctcaataacacgccgctgcagggcgcgcatatcaacgtcgtcagtggcaattttattattgcccagccgctgggcgtcgatgacggcgtggattactgccatagcgggcgtatccggcggattgatgaagacgcgatccatcgtcaactggacagcggtgcaatagtgctaatggggccggtcgctgttagtgtcactggcgagagctttaacctgaccagcgaagagattgccactcaactggccatcaaactgaaagctgaaaagatgattggtttttgctcttcccagggcgtcactaatgacgacggtgatattgtctccgaacttttccctaacgaagcgcaagcgcgggtagaagcccaggaagagaaaggcgattacaactccggtacggtgcgctttttgcgtggcgcagtgaaagcctgccgcagcggcgtgcgtcgctgtcatttaatcagttatcaggaagatggcgcgctgttgcaagagttgttcagtcgcgacggtatcggtacgcagattgtgatggaaagcgccgagcagattcgtcgcgcaacaatcaacgatattggcggtattctggagttgattcgcccactggagcagcaaggtattctggtacgccgttctcgcgagcagctggagatggaaatcgacaaattcaccattattcagcgcgataacacgactattgcctgcgccgcgctctatccgttcccggaagagaagattggggaaatggcctgtgtggcagttcacccggattaccgcagtagtagtaggggtgaagttctgctggaacgcattgccgctcaggcgaagcagagcggcttaagcaaattgtttgtgctgaccacgcgcagtattcactggttccaggaacgtggatttaccccagtggatattgatttactgcccgagagcaaaaagcagttgtacaactaccagcgtaaatccaaagtgttgatggcggatttagggtaagcgatgaaaatcgtcggatgcgacatgcgtaacactcgtacgtcgcatccggcaattacgtttattcccgactactaaacaacgccgccagaccactgcgccgctcagtacgagtggcgattgccgcacttaatatgcgctcatcggcatacaggctcagacggcgacgcgcgcgggtcaccgcggtataaaccagctctcgcgttactaccggcgtgcgttggctcggcaaaatcaacgccgcatggtcgaactcgcttccctggcttttatgtaccgtcatcgcccacgtagtttcgtgctctggcaagcgactcggttgcacagacttaatattgccgtccggcatcgcaaaccagacgcgcgtcccctgcccgcgatccagcgcaataccgatatcgccattaaacaacccaagcgcgctgtcattacgggcaatcatcaccggtcgaccttcgtaccaacgagagtgcggatgacgatgaattttgcgcttctgttgcataaactgctcaattcgctcattcagtccagccacgccaaacggcccttcccgcagggcgcacaaaagctggtactcattgaacgcctgaatgattaaatccggctcggcacgcgcttgcagcagatccagataacgtccgtaacccgcaagagcttcctcaagcatcgcaatataatcttcgccgctctgtaaaagccgtttttcgatatcagtaaaatcctgctgaaaaacggttttcactgccgttttatcaccacggttgatcgccgcagctaactgaccaatgccagaatcgctgccgaaacgatagcttttttgcagcaggcagagactgtcgcgcaaagatgccgcttctgtgccggttcctgccggaacgtgagtccccgtcaggcggcttagctgcctggcacgctcggcggtaaagcccgcgttggcataagcgcagatatcgcccagcacagccccagcctcaacgctggccagttgatcacgatcgccgagaaagatcactcgcgcatgatcgggcaaggcgtcgatcagtctgctcatcataggcagatcgatcatactcgcttcatctaccaccagcacatcaagatgcagcgggttaccggcatgatgacgtaaacgctggctacccggctgcgcgcccagcaatcggtgcaaagtgctggtatcttccggaatgcgtttcttttgttcatcggtcagcggtaactgtcgcaaagccttgccgagagattcggttaagcgcgcggcagctttacccgttggtgcagccagacggatacggcagcgttcgccgtcggccatttgaattaacgctgccagcaacttcgctacggtggtcgttttaccggtgccagggccgccggaaatcacgctgatccgccgcgtcagcgccactgccgccgcaactttttgccagttaatttcatcgcttactggaaaaagtttgtccagggtttgcgccagtagagcttcatcaacctcaatggcatgattcacttcgttgaaaaagcgtgccactgtgcgctcgttacaccacatgcgattcaaataaagacgatcgccacagaggatcatcggcgtgggttcatctcccctgctgaccgcttgagaagccagcaagcattcttcccaattttgtagctcaccgatttcactgacacaggtcgccaacagcggatggctcgcctcgttattttccagtcgactaagcggcaaacaaacgtgtccctctccggcatcatgacttaacagtgccgccgcgagggtgacggcaggatgttcatctcccgccacggtcagggcaaattgcacatccagcgggcgtagctgtttgtgctccacagcttccagtaattgcttttgcaatttcattacgcctcctccagggtcataccggcaaacatctcatccatcagggcaatcaacccggcgttgggtcgggttgtgtaaatcccctgttgcggatgttctttatcaacgccacgcaggaacagataaataacgccgccaaagtggtgctcatagtcgtaatcagcaatgcgatggcgcagataacgatgcagcgccagggtataaagctgatattgcagatcatagcggtgtgcctgcattgccgctgccatagcctgttgggtgtaagcgctactgtcttcacccaaccagttggatttatagtcgagcaggtaataacgcccttcgtggcggaacaccaggtcgataaagccttttaacatgccacgtacctgcatgaactccagcggcgggcagcctgcggatagcgggtcaaactggcggattaacgtatcaagctgactggcgataagcggttcactaatcggcagataaaactccatctccacctgtttattgcgggcggaaagttgactcaggcttacgccggtttcattgagaggtgcctggaggacagccgtgatccactcggtcaataccggttcccactggctttcaaagccgccgagttccagtttttcccgcacccagttcgggtcaaccggctgggtaaaatccaggtcttcaaacaaactgtgcaagaacgtccccggactcgcaccgcgcggaaactgatgtggtgttaacgtcggttcttcaacgacgctggcaacgcctgcagcatcgacatccagccgaggcatcaaatcctgggcgataccgtgaccacgctgttgcaaaccagagtagctggtgacgcgccagttatcgccgggcaatcgttgtaacgtcttcgcattcagctctgctgtagaaacatcattaacctgccagggttggttatcaccagtttgtgccgtttgccaggcaatatcatcatcgcataacgcttcaatacaggtgcgaagccctgccgcatcttgcggttcccctttttgcagcaaacgcccgagcgcactttggtggacgtcggtgtcaccttttttatcgccacgacggcgcaccagcggtgcaacgccgagactgcaatgccaaacgctacgtgtcagcgccacgtaaagcaaacgcagatcttccgccagacgttcggcctccgcgaggtcgacgctttctggcgcagcattaagatccagaactgcctcaaagctgtggcgatcgtgataaaacgcctgctcctggacgcggaaattggtgataaacggcagccagaccaatggatattccagccctttgcttttgtggatcgtgacaatctgcaccagatgtttatcactttcgagacgcatttgttggctggaggcattactgtctggctcgaggatatgttggcttaaccagcgtaccagcgcatgttcactttccagctgcgttccggcttcttgtagcagttcgctgatatgcaagatatcggtaagacgccgctcaccgcctgccgttgccagcaagttttcagcaatgttacgcgcgctcatcagcgcccgcagcatcggcataacgccacgtttgcgccagatttgccgataaccatcgaactcttcgactaccacatcccacgcatgttcgtcattgttcagcgtttcgatatccagcgcgttcagccccatcatactcgttgccagcgcactacgcagggtgttctcacgttcgggcgtcatcaccgcctgcaacaaccaaagcatttcctgcgcttccagagtttcaaaaacactgtcgcggttgctaaggtaaacggaagggatttccagcaacgttaaggcatcgcgcacctgggcggcctcctggcggctgcgcaccagcacactgatgtcgctagcacgcaccggacgcgcgtcgtcgccgttcatcagcaacgcttcgccccgctgtccggcttgtagccagtcgcggatttgcgcagcacatacctgcgccatggtactttgataatcgccaacgccgcagctttcgccttccatcagccacattttcatcgcaggctgtgtttcacctttaaatacaaaacgtaacgcctgatttttcccggcacttttcactggaataaacggtatttcgcgaaacatgaacgcgtcatcagtctggctgaaaagcttattcacgctgttcaccattcctggtgcggaacgccagttggtgtctaaagtgtagtgggcgtgaacttcgctacgcgccttcatataagtgaagatatccgcaccccggaatgcatatatggcctgcttcgggtcgccaattagcaacaatgcggtttccggctgatggtgccagatacggcgaaaaattcggtactgctgggggtcggtatcctgaaattcatcgatcattgccaccgggaatcgcgtacggatcgccgctgccaacacctcaccgctttcgctacgcagcgcggaatcgagccgacttaacatgtcatcaaaacccaattcgccacggcggcgtttttcacgcgctactgtttcgcggatctcagccaatgcgcgggtgatcaccagatcgcggatgctcaatggttctgcaagcagttgatcgatcgcctcaaacagtggatgtcgcggggtttcccccccggccttcgtgcgatcttctaagaaacgctgggagaatttttccaggctctccggcaactgataactgtttgtctcttcttctgcccaggcgctgatcttgtcgatccatttagcctgattgctacggttaaacttgcgtcgatcaataccagaagattcgatcagcgcatccagttcacccactgcgtcgcgccactgctgttttaccgtatcaatacgcgccacaatttgcgcgtgacgggaagccagcgtttcatcatcgggcggcggtgctttgataaccggcgcttcgccttgcagataacgattaatatcgcgcagcaacgcctgcggccctttccaggtttcaaagacgacctgggctatttcacgcggcagcgggtagcagtggcgacgccagaaatcggcgcaggcctggtagcgtagcagagactcatcttcaatcagctgctgctcaaacagcatgccggattcaaaggcattcaggttgagcatgcgctggcaaaagccgtgaatagtaaagactgccgcttcatccatctgccgttcggctaacaacaaccactgcgcggcttgcgctttatcgtcgatctcttccagcaggcgttcgtacagtggattgtcggtggtttcacgcagacaggcgatgcgcaactcgtggatattgctacggatacgaccgcgcaattctgccgtggcagcctcggtaaaggtgaccaccagcagttcttcaacggtcagcgggcggggaaaggcggcggaaccgcctagtccaagtaacaggcgcaaatagagcgccgcaatcgtaaaggttttgcctgtgccggcagaggcttcaatcaggcgctcaccctgtaagggcaagcgcaaaggatctagtgtctcggcgacatcactcattcttttcactcatcaggggcattgtttgctgcaacgcgctgacgttctcccacactttccagccttcagggtgtacatattcggctttcccgttctggctgccggaaatctggctcagaatagccatgccttgcggctcgaccaccgcctgatggaagaaatcagcaagtttttgcggcgtcagcagttttatctgggccacgattttatcacggctatcgaagcgcatattgccgcgatcgaaatctttacttaacttgcttgcttcttcgccgagcgtttgcggtgcctgcagcatctgggtaattaccgcctgctggatttgcgcaaactcatctggcttcatcgctcgcaattttgcctctgcggttgggaaaaacgccttgtaacgctcccacaagaaactaggctgtttatcattgctttgcaaaaggaagcccatgccccactgacgccccacgctcattggaaacgcaaacacggcatagcccaattgttcttcggtacgcaactgattgtagaaccacggctgtacgatctgccccaacagagagctataggcactgctggtgtattcatcgtagccagtcggtacaaataccgctgccagtgcggagtcggtgctgttaccggctttttcaaagatgacggattgttttttatcgaccactacatctttgtttcgacaccactcactaccatcagcgcccaactgtttttgcacatcgcgtgccagcgttgttgcctgggcctcggtcatgttgccgataaccataaactctggtcgagccccactttttaaggcgtcgcgataggccagcacctctttcaacgtaatggagggcaaaattttacgccgttcatctcggctgaagtacggcacttggctgagcatctgcgcgggcataatcgcctgctcaaacgctttacccttttctgcggaatccatcatctggttataccaggacttcgcctgctcaagctgatcttccgtagcggtatagctaaagtacccctcgagcaatgcctggaacagctgcggcagacgctgggtgtaaccattagcattaaccataaggccgttgttagcgttggtggaaaaacttatgccaccaacgctcgcctggttgcttaactgatcaagcgccagccctgcgagataatcattgagcgcaaacatcacctgattgcgggcgctgtccatggctttcggattacgcaaaatcaggctgacatcagctttgggctcgctggcaaaataacggcttggcgcatacaccacgcgcagattgctctcatcaacaatcagctctggatggtcgtatttcttctcactcttaatcaggctgaaatcatcaggaatataagggttaagctctggcaaagagagcgcaatgtcggcggcttttttctgccagtcggcgaaagtttgtgcgctgattttatcgacctgatacggcgcatcgacaaagtaagccgttttgttgtgcggctctttcgggctgatataccagatacgcgcattctgcggcgtcatcatcgccagacgttcctttactgctttagcatcgtaccgatcggcaatattgactgcatccagcgtatgctcaacaggaacgcgaatcatggtatctgccagccattcgacgtaatccatatcacgggtgatgctcggataacggaagtcgatatccagcacattcgccagttcatcgaagtattgtttatcaatgcctttttcacgtaacagattgagatagctaaaaattgccgccacaacctgatcgcgattagccaggcctttatcggttaaagacgcagagatcgctaatacgccgctgttgccgttgacgataggatcggagttggcgctaatgccctcaactaatccctgcttttgcagccagtcagaaagtgtacctgggctgcgattgccaatcagataggtaatcaattcatcggttttactacggaacttcgcactgttgttatcgatgcgaaactcaacgcgcaacactttacgcggcagcgcagggacgtaatgaatgataatgcccttttgcgcgtcggtgactaccggcacggtgatttccggttttttgctctctttgttcggcacgcgaccaaaggtgtccgccgccatttttgccaactccggcagcggtttattactgtaaataaccgccttcatcaaattggcggaatagtacttctcgtggaaatctttcagcgcctgctgcaccggattaccaggtttgtcgcttaaagtttcgaggttaccaccagaaaacttactaccggggtgtgccgggttaatggtttctgcgctgacctgtgccatgcgcatcccgtcacgcgtacgcgccatggttaattcagcgttcaccgcattacgctcacgttcggcatatttcttgtcgagcaaaggttcagcaatagcatcggccaggcggtctaccgcaccaggcaaggcgtcgttctcaacttccagatagaaagccgtgcgatacggcgcagtgctggcattgtgactaccgccgtgcattttgagatattcggccagactgtcagcctgcgggtactttttgctccccatcagactcatatgttcaaggtaatgtgccagcccctggtacgcctcgggatcttccaggctcccaacgggcaccaccagcgcgctgaggcttttaactgcctgcggatcagaaaccagcaagaccaccataccgttatccagacgtatagcctgatactggcggttatctttatcacttttacggatggtttcctgaatcggctgccatcccgtttctgcctgacttaagggtgcccaaagggcaactaacaacaataatgctttgaaccaggtgctgcggggcattcacggacctcataatcaacttaattttctgtccagattcaacacgttaacgcaaatcatctgccagaatttaatcttgtgctgcacgagtcagcctatgtttatataaccatcagtccgtgactggtgcgcatcataaagtaagcggatagattgcgcaatttttatacagcactcaactctgattaaagcgaaacagcggtaacaggaaacgttggctctgttcaacgatggcctccattgtctctggtgttaattgccgccagagcctttgataccagatatcatcaccttcgccacgcaccatcatgttgccttcgtaagcctgaaggaatttcgtacgggctttttgcaacgtggaatcgtcatccagcatggcatcgttttgcgcgtcataacaggtttttagccacgcgccgccactttcaggtaacaccagcaatggcgcggacattccttcacgatacccctcaatcagttgactgaggtaatgcaaagcctgttcggctgcaagcggcggaaaacgccactcgccgtctttgcgtagaaaaaggcgactttcaccattaccaccgctggcacagtagacaaggtgttccagccaaagttgcattccctgggccacacttaataaagagggacgccagcgcaacaggccatccggctgcacctgcggcaaccagccagttatctgcacaccgttgcaggcgagatcaatttccatactctgccccggctggcgacaggcaatgactctgtcggcaagctgctgcatctcctggcactgtgtttcccagaaaatttcaccaaaagcgccatacggtaaatcccctgccgctcggaagcggcggaacaagcgttcggcatcatcctgctcaaccagtgcattcaataactgctgattgatttgataacggctaagtccttccagaataaatggctcggtgtcggggatttcgctgtcttcagtacggaagttcacctgcaaacgcatctggaaaaatgcccgcaccggatgtgcccagaatcgttgtagcgtttccagcggcacggtttccggtaaggtaaacggcagcggctgaacaaattcagaatgtgctttaccagcctggctggccgcaggtagccattcacgagcatagctttgtcgttcgcctggctggtagttttgtggatcaaacggcatccgggtatggaggcaagtaagatgcgcttttacccttgcctcgctttcatcacagttgagcgcttcatcgcccggtagataatgactttgcccgatgtagtcgatcagttcctgcaccagtacgctcgggaaacgctcactgttatcctgaatggaacgaccgatatagctgatatagagtttttgctgcgcggaaattaacgcttccaggaacagatagcggtcgtcatcgcgacggctacggtcgccacgcttcggtttctggctcatcaggtcaaagcccaatggcgcaagctgacgtggataaacgccgtcgttcattcccagcaggcaaaccactttgaacggaatactacgcattggcatcagagtacaaatgttaaccggtccggcgagaaaacgctggctgatacgttcttgatccagacgctgtgccagttcatcacgcaatagactcagcggcaccgcgtcgccatactgcgcacctaaaccttcggcgataatcgcctgccattgttgttcgatcagcgtcatcgccgcttcggtttccgcatccggcaggaagaaggcgttgagcatatcgcgacaaaccggcaaccactcttccagcggacgctcctgtgccagcccgcgacgccagatgtttagctgcattagcagactagccagatgccccaccagttctgcaattaagccgctgctttcatcataaggtagaacgctttgccactcgccctgcgcgctctccatcgcgtagcccaacaacatacgcgtcaggccaaatcgccaggtgtgttgtccggtggcggggagttccagctcgcgaacgttgtcgtcatctatgccccaacgaatgccggattcgttgacccactggcgtaaataacgcagcccttcttcggtgatgtcaaaccgcgccgccagcaccggcacatccagcaacgccagcacatcctcactcacaaaacgactgtcaggcagacttaacaggctgataaacgcttccagtaccggatgactctgccgcgcacgacggtcggaaatggcgtaaggtaggtaacgatccgcaggtgcgctaccaaacacagcctgaataaacggactgtagctgtcgatatcagccaccatcacgatgatgtcgcgcggagtaagtgtcgggtcttcctccagcatcgccagcaggcgatcgtgtaaaacttcaacttcacgctgcgggctatggcaaacgtggaaggtgatactgctatccagtggatcaagcgggcgtttgttatcgctacgggaaaactcttcgatgttcacaccagcaacggcgcggttttccagttccagaatgtcagactgaatgttatgcagcaggttatctggcgtgacatcgacaaaggcgtccagctcctggctgctctccaggtcagaaaggagataaatgtagtcgcgcccaagcttaccccaactagccagcagcgggttgccgacatcctgttcaccatcgctgttaaagagctgcccggcattttcgctatcacgaaatagcggcaattcgcgatcttcaaaactgtgtcgacgctgacgggtcagcagtttcgccagataagcaggatctttaatatcgccccagtaataacggcaggggttggtaaacaggagatggatttcaatatgtttacccagcgcctgtagcgcctggagataaacaggcggtaacgcggaaataccgcatataaagacgcggctaggtaaccccggcgggcaggtcgtcgcggactccagcgtttcgataaagcgctgatagagattggcgcggtgccagcgcggttgcccgagttgatgggtatattccaccagcgccttccacaacggggcttgccaggcctgtgcttctcccagcccttcaaccaaatgtcctgtttcccactgtgccagccagtccggacgatagaccagatactggtcaaacaggtccgccgctttactggaaagctggaacagttttcgcttgtcgctatcgtcagtcagataatgccgcaacagggtaaagtcttcgcgctccagcaattgcggcagcagagtcatcagtttccagctcatgctctgtttgttaaaggcgctctctttggggatttccggtaacacccggacgaacatatcccagataaagctcgctggcagcggaaaatcaatgtttgccgcaataccaaacttttggctcagggtcatttgcagccactgtgccataccggtactttgcaccagaatcatctctggttcgaaaggatcgtccagccgttcgcgttcgacaataaactccatcaacgcttccagcacgtccagacgattggaatggtagacccttaacatagcggctcctgattactgacgattcgggcaatgcaggcgggtcatctcgccttctctgcccccgggactaactagcgtaacgctgatgctgacacatcccgcctggcttgtctgcattcggttgacctgccagttggcaggtgggctaatcgcgcgcagttgcgtttgctgccagccatgccgccagagctgttggtactggtttctgctggcaagactgttcattaatgttcgctggaaaccgcttaacgcagtgacaatcatcaccatcaacaccatcgccaacattacctccggcaggctaaagccttgttgattcttcagggaagcactcataacgccctctctttcagcggttaaatcagggaagctgacataacgccctctctttcagcggacaaaaatcgctccagccgcgtgggctaaaaacaatgtttccatcaatgacttcgcctgttcgccacaagctaacgccttcataaccggcaatcaataaggcttcattatctgccagtaaacgcaaacaaacctgggcatcggtttcagcgtactggctgcactgaactgctggctgcgtctgccagcagtgcatttttccccacgccagcgcgctctgaacgatggcctggcggcgcaaactctgactttccatgctcacgcgagaggcaaaactgcgatcctgttggctcattccttgtaatagcaaactacccaaaaccagcagcatcaggaccagagccagactgctaacacccttttcgcggttcacaggttgaatcctgtcacgctatagctggcattcaccacggtttgcggttcagacttactggcagcacgcatattaaccgtcaacaccgggctgaagccgctgacatcctgacgtacgacctgaaaagtgtcgataatgatggcatccggattagtgactttatcccagcccttaccttcacaggatgtcgcaccgcgtagcgtttccagcacatgctccttcagacgaaatccaatctggtcggactcttttaccggttcgcgatcccagataccgttactgttcgcatcccactgcacaatgacacagtcaccctgtccgacaatttccagcccttcgccggtacagatgccatgacaataacccgccctctggagatgcttcgcgacggtaaatacccgcagccagatttcatcttccagcgccagcttacgggtgctcgttaaactttcacgctgtaacgcaggcagaaagcgtgccgcccccagcaacaatacgccactgatcgccatagcaatcaacacttccagcagagaaaaaccttgctcttttacaggcatccttctgtttctccttgctgacaaagccggagtcttccccacgggctaaccaccagccaccactcgcccgtactgtttttgaagcgaatatgcccggcccatgcggtattgcgcaggccaaagaaagcaaggctaggtgtcaggtcgctcatttcgacttcgggccagcgtggcacaaagaccaatggactactgccatgacaggtattggccccagcagcggaactcacaaggcaccataacgtcccctccctgataacgctgatactgtggtcgcggttatgccagttggcatcttcacgtaaatagagcaaatagtcccgcgcctggctggcggtttgccatagccgttggctctgctgccagtattgccagccatagagtccacttgcgcttagcatgaccaaaatcagcatcgcgaccagcgtttcaatcagcgtataaccacgttgtgttttcatgccggcagtatggagcgaggagaaaaaaagacgagggccagtttctatttcttcggcgcatcttccggactatttacgccgttgcaggacgttgcaaaatttcgggaaggcgtctcgaagaatttaacggagggtaaaaaaaccgacgcacactggcgtcggctctggcaggatgtttcgtaattagatagccaccggcgctttaatgcccggatgcggatcgtagccttcaatctcaaagtcttcgaaacggtagtcgaagatggattcgggtttacgtttgataatcaacttcggcagcggacgcggttcgcggcttaattgcagatgagtttgatccatatggttgctgtacagatgcgtgtcgccaccggtccagacaaaatcacccacttccagatcgcactgctgcgccatcatatgcaccaataacgcgtagctggcaatgttgaacggcaggccgaggaagacgtcacaggagcgctgataaagctggcaagagagtttgccgtctgccacatagaactggaagaatgcatggcacggtgccagcgccattttatccagttcgcctacgttccacgcactaacaataatgcggcggctatccgggtcgtttttcagctggttcagtaccgtagtgatctggtcaatatgacgaccatctggcgttggccaggcgcgccactgtttaccatacactggcccgaggtcgccgttttcatcggcccattcgtcccagatggtgacattgttttcgtgtagataagcaatgttagtgtcgccctgcagaaaccacagcagttcatggatgatggaacgcaggtggcaacgtttagttgtcaccagcgggaatccatcttgcaggttaaaacgcatctgatgaccaaaaatggaaagcgttccggttccggtacggtcgtttttctgtgtgccttcgtcgagcactttttgcatcagttctaaatactgtttcatggttcctcaggaaacgtgttgctgtgggctgcgacgatatgcccagaccatcatgatcacacccgcgacaatcatcgggatggaaagaatttgccccatgctgatgtactgcacccaggcaccggtaaactgcgcgtcgggctggcggaaaaactcaacaatgatgcgaaacgcgccgtaaccaatcaggaacaaaccactgacagctcccattgggcgtggtttacgaatatacaggttgaggataataaacagcaccacaccttccagcagcagctcgtaaagctgacttgggtggcgcggcagcacaccgtaagtgtcgaaaatggattgccactgcgggttggtttgcagcagcaaaatatcttctgtacgggagccagggaacagcatggcaaacgggaagttcgggtcaacgcggccccacaattcaccgttaataaagttgcccagacgcccggcaccaagaccaaacggaatgagtggtgcgataaaatcagagacctggaagaaggaacgtttagtacggcgggcgaagataatcatcaccacgataacgccaatcaggccgccgtggaaagacatgccgccgtcccagacacggaacagatacagcggatcggccataaactgcgggaaattgtagaacagaacataaccaatacgtcccccgaggaagacgccgaggaagcccgcatagagtaagttttcaacttcatttttggtccagccgctgcccggacgattcgcccgtcgtgttgccagccacattgcaaaaatgaaacccaccagatacatcaggccgtaccagtgaagcgccacgggtcctatactgaaaatgaccggatcaaactccggaaaatgcagatagctactggtcatctgtcaccacaagttcttgttatttcgctgaaagagaacagcgattgaaatgcgcgccgcaggtttcaggcgctccaaaggtgcgaataatagcacaaggggacctggctggttgccggataccgttaaaagatatgtatatgatccgcgttataaccctccgcgaatcagcccgcccatgccgcgacgctccataaaggctgcaacctgatggcgaacttcggtcgccagttgcgcttccagactacgctgcgcaagattttctgcttcggcataatcaatgcgccgcagcaggtattttgcccgcgctacagaacgtccgttcatagacagatggcgatacccaagcccaatgaggattgccacgcacatgggatcgcccgccatttcaccgcacaaacggagatcgattccatgtatttccgcttcccgggcgatcatcgccagagctcgtaacattgcaggatgaagactgtcataaatgttcgccacccgggtattgttgcgatcaacggccagaatgtattgagtcagatcgttggtgccaacagagatgaaatcgacccgctttgccagatgcggcagcataaataccatactcggcacttccagcatgatgccgatacgtggtttgggaatttcgtaaccgatcatctcctcgacttcacgtccggcacgttcaatcaggcggcgtgcttcatcaacttcatcgaggcttgtgaccatcggcaacagaatattcaggttgcccgtagcggcattagcacgcagcatcgcccgcacctggatcaagaagatctccggctgatcgagcgtaatgcgaatcccacgccaacccaggcatggattctcttcgctgatcggcatgtaaggcagctgcttatctgctccgacatccagcgtacgcaaggtgacgggtttatcattgaacatttgcagcatcccctgatactgcgccacctgttcttcttcgctcgggaaaccactttgcagcatgaatgggatttcagtgcgataaagaccgatgccatcaatacggctgcccagtttttcttcatgttccgggcttaaaccagcattgagcatgacttttatacgctcaccgctttttaactgcgcgggtaaattgacgtcatcttccgccagacggctaagctcaatctcttcactaattagccgctgatattcttgcagcagtaccggctccggatcgaccagcaattcaccgcgatagccatcaacgatcagcgtcctacgatgcagcacgctaggctgaatatccgcgcccatcacggtagggatccccagcgcacgtaccatgatcgcagcatgggagttggctgcgccatctcgcacgacaacaccgactaagcgatcctggggcagctcagcaagcgttgtcgcactcagttcatctgccaccagaatgaaacgttccggccaggcgttcggcccttgattagcgtcatcaagatgaaacagcaatcgctgacccagcgcacgtaaatcgccagcccgctctttgagatagttatcacttagcgcggcaaactgttcggcaaatttttcaatgaccgtttttaccgcccactctgccacgctgcctttatcaacctcggcaaacaattcgcgacgcagccgggtgtcgctaagcaggtggctgtaaagatcgaaaatagccgccgtttctttttgtgcaccggcggcaaagcgtttgctgtagcggcgaaactcgtttgccgcttcttccagcgccccggtcagtcgttcgcgttccagagccggatccagcgtacttgcctgatacacctgttccattaaaggtaacgtggcatcctgccagccttcggcaatcgccacaccaggtgctgccggtaatgcgcggattcgcgtctggcgatattgcccaaacaaggcagtcaactggctctgagaaagaatagctgccatctgggtggcaagcgtcaccaggaaggattcttcactttcgtcatactggcgcaactctcgttgctgtaccaccagtacaccaagcaactggcgacgttgaataattggtacgcctaaaaacgcgcggaaacgttcttcttttacggaggggatgtatttgaagctggggtgcttttgcgcatctgcaaggtttatcggttccgccagcctgccaaccaggccgacgatcccttcatcaaacgcgagcgttacagtgcgaccgcgtggttttttcagcccccgggtcgccatcaggtagtaacaacgtcgatcatgatcggccaggtagacgctacagacctcggtatccatcgcaagacagatgtcggtaaccagaatatttaacgcctcattcaggcgtggtgcgctggctaccttttcgactatttcgcgcaggcgagtgagcataattggcgtgacttaacctcttttacgtcgataagcagatgcgttttgtggttttggcgtattttcctgcagactcatcaccacactcgcgaactctttcattaccctacggtagacatcacgtttaaaactcaccacctgtctgaccggataccagtaacttacccatcgccagccgtcaaactctggtgtactgctggtttgcatattgatttctgcatcgccgctcaccagctgcaagagaaaccatttttgtttttggccgatacaaaccggcttcgtgtcccaacgcaccaaacgtttcggtaatttgtagcgcaaccagttacgcgtactagcaaggattcgaacgtctttgcggcttaatcctacttcttcaaacaattcacggtacatcgcctgctctgcggattctccggggttgattccgccttgcggaaattgccaggagtgctgaccaaatcgccgggcccacattacctgcccctggcgattacaaatcacgatacctacgtttgggcggtagccatcgtcatcaatcaccggactacctcaaaataaagctttatatacgaatgattgtttcatactccaggaagacggtaaaccactctctgcagggcattacacactaataacaattgaataactcacagttatgtgcagagttataaacagaggaaggggtggatagccgtttttattcaccttttctgtggatagagttgtgaagaactacggaattactacgggaaaacccggagcattctgaataagcccgatatagacattttaaaatattcattatcagtcaatgcattacatgtaattttagtaatgaaaaagagtaattcgtgacccaggtcacacctctcatttacgggttggcgaaagatcaaccaatgccgtatttatccacagaatgtgccactaagttaagcactgaaccactaaaaactggagtttcgtcgcacgtcaaggctgtaaatggaaacagtagtggaggtttttcacagttatcccagctttctgtggataacatggtgtaagatcctgtttattttcagtgaccagatttggaaaacccgttgcagtgttgcgcaactcgattaccggcaacctaaaaagcaatataaatcagagaattgaacaacgcatgtggaaaaagttacactgcgaatattcggcacataattgctgtttgttttttaatcaaggtatcatgacatgtcccaacctcgcccactgctctctcctcccgaaactgaagaacagttgttagcgcaagcacagcaactttctggttatacattgggagaactggcggcacttgtcgggctggttacgccagagaatttaaaacgcgataaaggctggattggcgtgttactggagatctggctaggtgccagcgcagggagtaaacctgagcaagattttgctgctctgggcgtggaacttaaaactatccctgtggatagtcttggtcgtccgctggaaacaacattcgtttgtgttgccccgttaacgggcaatagcggggtgacctgggaaaccagccacgtgcgccacaaactcaaacgcgtactgtggataccggttgaaggcgagcgcagcatcccgctggcgcagcgtcgcgttggaagtccgttgctgtggagcccgaatgaagaggaagaccggcagctacgcgaagactgggaagaattaatggatatgattgttctcggtcaggttgagcggattaccgctcgtcacggggagtatttacagatacgaccgaaagcagcgaatgcgaaagcgcttaccgaagccattggtgcccggggcgaacggattctgacgctgccacgcggcttttatttgaagaagaatttcaccagtgcactactggcccgtcattttctgatccagtaaccatcgctttgacctgccgctttccgggcatataattaccgcttcatttttttggcagggctttttagatgttatttgcatggataaccgatcctaacgcctggcttgcgctcggtacgctgacgctgctggagatcgttcttgggatcgacaatattattttcctttctctggtggtggcaaagcttcccacagcacaacgtgctcatgcgcgccgtctggggttggcgggagccatggttatgcgtctggcgctgctggcaagtatcgcctgggttacgcgcctgacaaatccgctttttacaatattcagtcaggaaatttctgcccgtgatttgattctgcttctgggtggcttgttccttatctggaaagccagcaaggaaatccacgaatccattgaaggtgaagaagaagggctgaaaacacgcgttagtagtttcctcggcgctatcgtgcagattatgctgctggatattatctttagcctcgacagcgtgattacggctgtgggtctgagtgatcacctgtttattatgatggcagccgtggtgattgccgtaggcgtgatgatgttcgccgcgcgcagcattggtgattttgtcgaacgccatcctagcgtaaaaatgctggcgctctctttcctgattctggtgggctttaccctgattctggaaagtttcgacatccacgtaccgaaaggttacatctacttcgcgatgttcttctctattgcggttgaaagcctcaacttgattcgcaacaaaaagaatccgctctgatactccgtacgctctcctgcgggagggcgtactcactccttttaccctcacagtttaagattttcctgctttcaagatatataacgtcggtttataaacagactattatcataggtaggccaaatgaggataaccggatgaaaaaatgggcagtaataatttctgcagtcggactggcgtttgctgtttccgggtgttccagtgattacgtcatggcgaccaaagatggccgtatgattttgaccgatggaaaacctgaaattgatgatgataccgggctggtgagttatcacgatcagcaaggtaacgcgatgcaaattaaccgtgatgatgttagccaaattattgaacgttaacaaataaggtcagcatccggctggccttaagatttttctctttcccttttcccttccctctgccatttttatattccttatgtcgtgattataaaaaggaaacggctatgcaatatcaccgtataccccacagtagcctggaagtcagcacgctggggcttggcacgatgacgtttggtgaacagaacagcgaagccgacgcccacgcacaactcgactatgccgtcgctcagggcattaaccttatcgacgttgccgaaatgtacccagtacctccgcgccccgaaacgcaagggttaaccgaaacctacgtcggcaactggctggcgaaacatggcagccgcgaaaagttaattatcgcctccaaagtgagcggaccgagccgcaataatgacaagggcatccgcccggatcaggcgctggatcggaagaatatccgcgaagcgctgcatgacagcctcaagcgcctacagactgattacctcgatctttatcaggtgcactggccgcagcgcccgaccaactgcttcggcaaactcggttatagctggacggattctgcgcctgcggttagcctgctggatacgctggacgcactggcagagtaccaacgcgcgggaaaaattcgttatatcggcgtgagcaacgaaactgcatttggcgtaatgcgctacctgcatctggcggacaaacacgatctgccgcgtattgtcaccattcagaacccttacagtctgttaaaccgcagttttgaagtaggtctggcagaagtcagccagtatgaaggggtcgaactgctggcctatagctgcctgggtttcggcacgctgaccgggaaatatctcaatggtgcaaaacccgctggcgcacgtaatacgctctttagtcggttcacccgctatagcggtgagcaaacgcaaaaagccgtcgcggcgtatgttgatatcgccagacgtcatggcctggaccctgctcagatggcgctcgcgtttgtacgccgtcaaccgtttgttgccagcactctgctgggcgcaaccacgatggatcagctgaaaactaacatcgaaagtttgcatctggagttaagcgaagacgtattagctgaaattgaagcggtgcatcaggtttatacttatccggcaccataagattaacgccggttaaaaccggcgttaaatattaatgacggcgctgccagatccacagcgccgttattgccagcgcaaacagcgcaccgaagccaatgccaatgggcacgaccgggatgcctatcattaccgccaggctgtaaatgcccagcatcaacaacatggcgctgttttcgccaaggttttgtactgcaatcgcattccccgccccgacgctttttttaccccgctcctgtagcaacgcattgagcggaacgacaaaaaagccccccatcacgccaatcagcatcaacaaggcataggctggcagcagctcgtgttgcagggaaaaaatcagtaccaccacgccaatcaaaatcccggctggcatacagcgactcacggtttccagcgtaactaacttcgctgccgcacctgcgccaaccacgataccaatcgctaccatcgcgttgagataggtgggcgtagcgttatcggtaatgcccagcgccaccggtacccacagcaccaacaggaaacgcagcgtgacacccgctccccagaataaactggtgcccaccaggctaaaacgcgtttcaccattgcgccataggctggtgcaggcattcaggaaactgcgggtcatgttgatgagattccaggactgccccggacgcgccgccgccagtttgggaatgtagatattggcaacgaccgcaccaccgtaggccagtgcgcatgcggccagggcgacgaggacatgccagtcagccagcacaccaccggctacggaaccgagcaaaatcgccgctatggtagaagcttccattaaaccgttagctttcactaacttactacccgtggttaattcgccgagaataccgtatttcgccggactataggctgcagcaccaacacccaccagcgtatagccgagaaacggattgataccaaagcagatactggctgcgcccagcagcttcaggccgttggcaaacatcatcacccggcctttggcgaagctatccgccacctgcccgacaaacggcgcaaaaagaatgtaagcacctacaaacaccatttgcaggatgggctggctccactccggatagaactgcgctttcagtaacgccagagtggcaaacagtagggcattatcgccaaacgcagagagaaactgcgccacgataaccgctttcatccccttgctccacaagctagtgttagtgtgcacactctcactcatcgtgttgttccgcttcgtctacccagcttttcaacgtgacaaagtcaggtttgccgctgccaagtaatggcatctgtttcagatagcgaatatcgcgcggtacagcaagctccggcacgccgtgctcgcgggcatactgttgcaacttatcgcgcgtcagttcgttatctgtggtgaaaagcaccagtgcctcgcctttgctggcatcgctcttaatcgcagtggcatggactttatctgggctaacaccaagtgccagttgttccaccatttccaggctcaccatttcgcctgcaattttggcaaagcgttttgcgcggccctgaatctgcacaaagccctgctcgtcaaaacgcacaatatcgccagtgtcataccagccgcgctccatttcgccgcgaacattctcggcggtgggcacttccagtacacctggcttctccacccgcagatagccgttcattatgttcggccctttcagttgcaggcgtccgccctcttcgataccagggacgctcaacaggcgcgcatccattcctggtagaatacgccctaccgtaccgggtttcgccgccatcggtacgttgatagaaacgacaggcgcgcattcggtcacgccgtagccttcaaggatgcgcaggccaaatttatcctgccaaagctgtttggtactttcttgtaatttttctgcgcctgccaccacatagcgtagacgatagaagtcatacgggttggcgaaacgcgcgtagtgaccgaggaaagtgctggtgccgaacaacacggtgcaactgcggtcatacaccaactccggcacaatgcggtaatgcagcgggcttggataaaggaacacttctgcacctgtaagcagtggcgtaaacaggcctaccgtcagcccaaaggagtgaaacagcggtaacgcgctcataaagcgatcgttggtggtgaagtcggcaatcgttttaatctgctcgacattcgccagaatgcttttatggctatggacgacgcctttcggatggccttcagaaccggaggtaaaaaggatcagcgcctcttcttccggctgctgtttaacctgtgccagacgcggcatcagcaaatgagcgaagatccatactttgtcggcagtggtgacatctgcttttaaatcttccagatagacccagcgcacctgagtaagttgctccggcagatgccagagtttgcctttatcgagaaactggcgggaagtgaagatggttttgatttcagccgccgtaatagcactggtcagcccttttaccccggcagtgtagttcatcattgcgggcatgcggcgacgggcgatggccccaaaaatcactgccgcactgatgcctgcattgggcagcattaagccgatgcgttcgccttcaacactgtatttttcaaggatgcgtccaacaaacagcgttttcgtaagcaatttgcgataggagtctggggtaaagttgacgtcttcgacacatttcttcccggctccgaagcggtacattgcactcagtaaagattcgtacagcgtttcacgcgggcgcaccgccattcgcgcttccatcattatttgatgcagcatttcgccagcgattttgcgacggtcacgggcacgcggcgcatccggcatcgccacctgcgttggtggcaaaatatgcagagtaatttgcgggaacaagcgacgtttaaccagacctttcaggcggctgaagtgcgtaagttccgccccttcaatacgcacaggaataaccgtcgcaccagacttcgccgcgacaaaacccgcgccatcgtagattttcatcaggctgcctgtcgtggtgatgcgtccttcagggaaaatcaccactggtcggccctgttccaccagacgtaccagatgtttaatagccataggttgcgtcgggtcgagaggaacaaagtcgataaaacttttcagccaacgcatataccactgttggcttatactggtgtaaacggcaaacactggacgcacaggtaaaaacagtccaagcaaaatgccatcaataaaagagacgtgattaggcgtaattagaacgcgctcgcccttcagtgcctgggtgtcacccgtaacgcgaacgcgatacaaaacacggcacaaatttcgaaaaaagctaaaaagcattccaactccctttgctctgattcagtaaaagcgaatggagggagattacacgagataaagaacgcgagcgacagtaaattaggtgcgaaaaaaaacctgcgcatccgcgcaggttggtgcaagagacagggtacgaagagcgtaccgaataatctcaccaatcaatacctctgggatcttgattgtggtctgcacgacgactcttcgccagcgagaaaacgcaaaggaatgaagggaaatgcaacgaggtgtgtaaattgtcggttactgttacagattgatgaccggcaaaaaaaacctgcgcatctgcgcaggctggtgtaattcatgtgctcaacccgaagttgacttcacctatcaatacctctgggatcaccactttagcaacctgaagccaaacgccaccagcggtcaatcgcaacagcgtttcgcaaagtgtaaccaaaggtttgcaatctctttttttgtcttacttatttgcgtttggctcacattcccacgatgaaaacacgccaccccttgaaccaacgggcgttttccgtaacactgaaagaatgtaagcgtttacccactaaggtattttcatggcgaccataaaggatgtagcccgactggcaggcgttagtgtcgccaccgtttcccgcgtcattaataatagtcccaaagccagcgaagcttcccggctggctgtgcatagtgcaatggagtctcttagctatcacccgaacgccaacgcccgtgcgctggcgcagcagaccactgaaacggtcggtctggtcgttggtgatgtttccgatccgtttttcggtgcaatggtgaaagcggtcgaacaggtggcttatcacaccggtaattttttattgattggcaacggttaccacaacgaacaaaaagagcgtcaggccattgagcaactgatccgccatcgctgtgctgcgttggtcgtccatgccaaaatgatcccggatgctgatttagccagtttaatgaaacaaatgcccggtatggtgctgatcaaccgtatcctgcctggctttgaaaaccgttgtattgctctggacgatcgttacggtgcctggctggcaacgcgtcatttaattcagcaaggtcatacccgcattggttatctgtgctctaaccactctatttctgacgccgaagatcgtctgcaagggtattacgatgcccttgctgaaagtggtattgcggccaatgaccggctggtgacatttggcgaaccagacgaaagcggcggcgaacaggcaatgaccgagcttttgggacgaggaagaaatttcactgcggtagcctgttataacgatagtatggcggcgggtgcgatgggcgttctcaatgataatggtattgatgtaccgggtgagattagcttaattggctttgatgatgtgctggtgagtcgctatgtgcgtccgcgcctgaccaccgtgcgttacccaatcgtgacgatggcgacccaggctgccgaactggctttggcgctggcggataatcgccctctcccggaaatcactaatgtctttagtccgacgctggtacgtcgtcatagtgtgagtactccgagcctggaggcaagtcatcatgcaaccagcgactaaccgcagttaaagcaattccagcgccagtaattcttcgatggtctggcgacggcgaatcaaccgcgcctgaccattatcaaacagaacttctggtaacagcggacggctattgtagttggaactcatacttgcgccatatgcccctgtatcatgcagtaccagataatcacctgccttcacttccggcaaggcgcgggtttcaacatttcccccttcctgctgggtaaagacatcgccgctttcacataacggtccggcgacgacggtttccaccgttggcgcgtgttccagagaacgaccatcagctgccagggcactgatatggtggtaactaccgtacattgccgggcgcatcagatcgttgaacccggcatcaaccagcacaaagtggcggctccccatttgtttgacgctccgcacctgagtaattaatacgccagactgcgctaccaggaagcgacccggttcaatttccagtttcacagggtggcccaaatggcgggcgatttgctcacgcgcggcattccacagaccataataatgttcggtatcaaccgcctcttcaccctgttgataaggaacagaaagcccaccgcccgcagaaatagcctgtaaatcctgaccgaattcgatgacctgacgcaccatagcaccacacacctgttccagatgggcataatcaacgccagaaccaatgtgcatgtgaatgccgaccagctgcagatgatgacgttgtatcacgtccagtgcggcgggcagatcggtgtaccagataccgtgcttgctgttttcgccaccggtattggttttttggctatgtccgtgaccaaaccccggattaacgcgcagccatacccgatgccctgggctaacctggcccagttggtcgagcatatcaacagaacccgcattcaccggaatttgcaattcactgacgcgttcaagcgtcgcctgatcgataacatctgccgtaaaaacaatatcatcggggtgcgtttgcggattgtaacccgccgccaacgcacgctctatttcgcctaagctgacggaatccactttcacgccctgctcacgcattaagcgcaaaatatgaatattggaacaggctttctgtgcaaagcgcaccacatcaaactgtttcagcgctgcaatctgccgacgaataatttgcgcatcgtagacccacaccgggcagccaaattcagcgggcaaacgcagcagattttcggcggtgagatcggtatcggtgctgaacagactatgtggcataacaaactccagataagtgcttttttatgattacgccacatcataaaaagaataaaaaatatcgatttatgtcgagtctatgcaaaaatgatatggattaccggattgcgagagagcgctaatggccgccgttaacttacgtcatattgaaatttttcatgcggtaatgaccgccggaagcctgactgaggcggcacacctgctacacaccagtcagccaaccgtcagccgcgaacttgcgcgctttgagaaggtgatcgggctgaaattgtttgagcgcgtacgtgggcgattacatcctaccgtgcaaggactgcgtctgtttgaagaagtgcaacgatcctggtacggactggatcgcattgtcagcgccgcagaaagtctgcgcgagtttcgccagggagaactgtctattgcctgcctgccggtctttagccaatcttttttaccgcagctcctgcaaccctttctggcacgttatcccgatgtcagcttaaatatcgtgccccaggaaagtccgctacttgaagagtggctcagcgcccagcgtcatgatttaggactcactgaaacgctccatacgcctgcgggaacagaacgtaccgaattactctctttagatgaagtgtgtgtgttacctccgggtcatccgctggcggtaaaaaaggtattaacgccggatgattttcagggtgagaactacatcagcctttcccgtactgacagctatcgccagttgctggatcagctatttactgaacatcaggttaaacgacgcatgatcgtagaaacccacagcgccgcgagtgtctgcgcaatggtacgggcgggggtaggtattagcgtggttaacccgctcaccgcactagattatgcggcaagcggtttagtggtgcggcggttcagtattgcggttccgttcaccgtcagcctgatccgccccctgcaccgcccgagtagtgcgctggttcaggcgtttagtgggcatttacaagcggggttaccgaaactggtcacttctcttgacgctattttgagcagtgctacgacagcataattagctcagcataaaagcgacagcatcctcggcatggatcgccgcggtatcaaacacaggcaaaacactgcgctcttctggcaccagtaaaccaatttctgtgcagccaaaaatgacgccctgtgcgccctgttctgcaaggcgagcaatcacttgcgcacaataagcgcgactcgcttcggtaaattgccccagacacagttcttcaaaaataatctgattaattttcgcccgttcatccgcttcaggaataagacaattgatggaaaattgttccgtcagccgcccgcgataaaaatcctgttccatggtgtaacgcgtacccagcagcgccacacgagtcattccggccccggtaattgcacgtccggtggcatccgcaatgtgtaagaaaggcagagtgcaacgactctcaatggcatccgccactttatgcatcgtattggtacatagcacaataccttctgcgcccgcccgctgtaagccaagcgccgcctcagccagaatgtccccggttttatcccattccccgcgacgctggcactcttctatttcatgaaaatcgacgctatgtagcagcacttgcgcagagtgaagcccaccaagccgctgtttaatgccttcatttatcaaacgatagtaaggaatggtggattcccagctcattcctcccagcaaaccaattgttttcattcctctctcctgatgtgtgttaccgcaacaaggctgaataaggaacgagacaaacgcctcaacggccaagtgcccaatctctattaacgaaaaaagggccggatgtacagcacatccggcccgtgaaatcagacgccgatatttctcaacttctcgcctgccatcagtttgcgttcgatatgttccagcgtgacatttttggtttccggaatgagccagaaagtaatgcccacaaacgcaatgttcagcgcagtgtagagccagaacgtaccggcagcgccaatgctatcaagcagtgtcaggaaggtcgcgccgataatcatattgctcacccagttcgtggtggtgctacaggtaataccgaaatcgcggcatttcagcggctgaatttcagagcacaggatccacaccactggcgcggcgctcatcgcataaccggcaatacacatcatcgtcatgccaacagagagccaggacaagccactggaagccgtaccgttatcaaactgcatcaggcaatagcccagcaccagagtgcctaacgccatcacgctgaaaccaattttcagagccggtttacgccctgctttatctaccgtaaacaccgcaataaaggtggcgaacataaaggtcagccctacgaccagagtcgcaatcatctgttgttctgtggtcgtaaagcccgccattttgaagatacgcggcgcgtagtacatgatgatgttcataccggtaaactgctgcatcgcctgcaacaacataccgagaaacacagcacgacggacgttacggttgatcttaaacagtgcccaaccgccctgttttaacttcaggctttcacgaatttcgttgagttcttctcgcgctttttcgctcgtatcgcgcagcatacgcaatacttcttccgcctcaatatgacgccccttttccgccagccagcgcgggctatttggcaggaagactaccagaataatcagcagaactgctggtaaagcaagaacccccaacattgcgcgccagttaccgctataactgaacgctgtatcggataaaaacgccagcacgatgccgagtgtgaccatcaactggtacatactgatcatcttaccgcgaacgttttcacttgccatttcagaaagatacagaggagcggtgtaagacgcgatcccgacagcaatgcccagcaccacacgagcggcgattaacatctctacgctggtcgcaaaagcggaccctatagaaccgagtacaaacaggatggcccccgccatcaggctgtatttacgccccaggcggaagctcagccaaccattaaacagcgcaccaattgctgcaccgagcatcatgctactaaccacccattcctgcaaacgactggtcagcacaaagtgatcggtaatgaacggcaacgctccggcgattacgccgatatcaagaccaaataacaatcctgcgaccgcagcagctacgctaacaaacatattcatacgccgcgtatcccgcaaagaacgtggcgttaaagcagattccgtattgatagtaaccattttttcctgccagcagagagtaagacatagtgaaaaaatacgtgaacaactcacgcaggtgtcaggtcggaaacagcataaatatggattaaattgctgcgacatgtcgttatgtgatggatattccaattttcaaattaagttgaattattgagattattattaaccacctaattttacagcagataaaattcataaagttcattaattgataattaatatggattatttcataaccatgatatggattatgatgatctacaggtataaaaaaccctgccatgcggcagggtcataaaagtaagaagaatgaattaacgcgccagccaaccgccatccacggcaatggtataaccattcacataatcactagcgctggaggcaaggaacactatcggccccatcaggtcactcggcagtccccaacgaccagctggaatgcggtcgagaatttccgcgctacgttgttcatctgcccgtagttgttgagtattgttggtcgccatgtaacccggggctatcgcattaacattaatgttgtgtttagcccattcgttcgccatcaatcgcgtcacacccatcacgccgcttttacttgcggtataagaaggcacacggatcccgccctggaaggagagcatactcgcgatattgataatcttgccgccattgccttgcgcgataaagtgtttcgccgctgcctgagacatgaagaatacgctcttgatattcaggttcatgacatcgtcccagtccttttcgctgaactcgagagcatcttcgcggcgaatcaatccggcgttattcaccaggatatcaatatgaccaaactccgctaccgcgcgatccagcagtgctggaataccatcaatctttcgcagatcggcggtcaggcttaaaaaacgacgccccagcgctgtgacctgctcgatggtttcagtcggttcaacgatgttaatgccaacaatgtcacagcccgcttgcgccagccccaacgccatcccctgacccagtccagtatcacaaccagtgacgaccgcaactttaccttcgagagaaaatgcacttaaaatcataacaataccttattcgtttatgcccacaattagcgcaaatctttaacggccacatggtccatatcatcaaagacctggttttcaccgaccatgccccagataaaggtataagctttggttccgacaccggaatggatgctccagctcggggagatcaccgcctgctcgttatgcatcacaatatgacgcgtttcttgcggctgccccatcatgtggaaaacgcaggcgtcatcatccatattgaaatagaaataaacttccatccggcgctcgtgggtgtgacacggcatggtgttccacaagttacccggagccagctccgtcagccccatactcaattggcaggtttccagtacatccgggacaaaatatttgttaatcgtgcgacggttactggtgaggttatcgcctaacgtgactggagatacttcgtccggtgtgacttttttggtgggatacgtcgtatgcgcgggtgcgcaattgtaataaaacttcgccggagtgccggtatcaatactggcaaagacaacttcttttgcacctttaccaacatacagggcgtcgcggtgaccgatttcatagcattggccatcgacagtaatcgtaccggcaccgccaatattgataacacctaactcgcgacgttcaaggaaatagcttacgccgagttgtttaccaacttccccgccaacggaaaccgttttagttatcggcataatgccgccaacaataattcggtcaatgtggctgtaaaccatggtgtactcatcggcgacaaataccttttcaaccaaaaattcattgcgcagcccttgggtatccagcgtttttgcgtgcgcactgtggatgctctgtcttacgtccacatcaacctccgataatcagtgaagcgtgaaaatagaaaacgatagtgaaacactgtttcgttttctctataaagggatgatatgcccatgggctagggttttcaattaaaaataaaacaatgtttcatttttaagttaaggattaaaaaaagtgcagtgtcgatcacgaatatgtcatgagaatggaaaaatgagggagcccagaaaatgtatgtcgacttgccagccatcattattcaacagattaatgacggcagatatttatcggtaaggaggaaatgcagagttattcgtcacgttcaatggtcaatgccacaccctggcccccgccgatacaaagcgttgccagtcctttgcgggcattacgtttcaccatttcatgaaccagagaaaccaggattcggcaaccggaagcgcctatcgggtgaccgagtgcgatcgcgccaccattgacattgacccgacgctcatcccactcaagcatcttgccaacgctaagcgcctgtgcagcaaacgcttcattagcctcgataagatcgacttcagccaactgccagcctacacgctccaggcaacggcgggtcgcatacaccggcgcaattcccatcaatgccggatctacaccaacgctggcaaatgcgcgaatgcgggccagcacgggtaaattcaacgctcgtgctttggcttcgctcatcatcattaccgcagctgcgccatcgtttatggaacttgcattacccgctgtcacagaaccgagactatcaaaactaggatttaaacgggctaagccttctgcgctggcgtcagtgcgtggctgttcatcggtatcaacaaccaacgtctgcccgttactttgggtcattaccgggacgatctcatctttaaatcgtccggcgtcaatcgccgctcgcgctttttgttggctgctaagtgcgtaagcatcctgcaactgacggctgatgccatattcgcgagccagattttcggcggtgacaccaatatgataatcattgaaggcatcccacaacccatcatgcacaagactgtcaaccaactggctattgccaagctgtgcaccggtgcggctatcagtcagaacatgtggtgcgcggctcatgttttcctggccaccggcgatgacaatatcagcctcgccacactgtatcgcctgagtagccagatgcagtgctttaagcccggaaccgcaaacgtcattaatagtgattgcagaaacgctattaggcagaccacctttaatagcgctttgccttgccggattctgccctgcccctgcagtcaacacctgaccaagaattacttcatccaccgcatatgcaggaacgccggtacgttctattaacgctttcacgaccagactaccaagttccacggcggaatgacccgctaacgcaccacgaaagcagccgataggtgtccgtaacgccccgacaatcacaacgtctttcatcacaacctcgcaccaattaacagtgcaatagtaaatgattgttaattacagttatcttaattgtttaaaaaaagtgatttttatcacaaaggaaatatgcctgagcagcagtcagagacataactggcacgtaaggtttgcaaccactaacccaccaatagaggggtagatagggcgttaatctcccatacttaacctggtttatggtaaattgccctccattttgtttaatttgtagatgatacgttcagataatgtctaatatttggtctaaagaagaaactctgtggagtttcgcgctctacggcacagccgttggtgcaggcacgctcttccttcctattcagttaggtagcgcaggggctgtggtcctgtttattactgctctggtcgcctggcctttaacatattggccacataaagccttgtgccagttcatcctcagtagtaaaacaagtgcaggtgaagggataacgggcgcggtaacacactactatggcaagaagattggtaatctgattaccacgctgtacttcatcgccttttttgtcgtcgtgttgatatatgcagtggcaattaccaacagtcttacggaacagctggcaaagcatatggttattgatcttcgcatccgtatgttggtgagtctgggtgttgtattaattctgaatctcatttttctgatgggacgtcatgccactattcgggtaatgggatttttggtattcccattgattgcctatttcttatttctttccatttaccttgtcggtagttggcaacctgatctattaacaacccaggtagagttcaatcagaatacccttcaccagatatggataagcattcccgtgatggttttcgcctttagccatacgcccattatttctacgtttgccatagacagacgtgaaaaatatggcgaacacgctatggataaatgcaaaaaaattatgaaagtcgcttatctcatcatctgcataagtgtactgttctttgtctttagctgcctgctttctattccacctagctatattgaagctgctaaagaagaaggggtcaccattttaagcgcgctttctatgctgccgaacgccccagcatggttgagtatttccgggattattgtcgcagtagttgcgatgagcaaaagtttcctgggtacgtactttggcgttattgaaggtgccacagaggtcgtcaaaacaacactacagcaggttggtgtaaagaaaagtcgtgcatttaaccgcgcactaagtattatgttggtaagcctgattaccttcattgtttgttgcattaacccgaacgcgattagcatgatttacgcgatcagcggcccgctcattgccatgatacttttcatcatgcctacgctgagtacgtatctcatcccggcgcttaaaccctggcgttccatcggaaatctgattacgctgatcgtgggtatcctgtgcgtaagcgtaatgttctttagctaatatcagttgtggatggttcaaaattgctacaattttgaaccattccatttttcataatattcatttgttattattccaccctatcacttctctcgtcatatcctagtattatcagttagttaaacacacaaagagatctgaacatcttaaataagactatttaagatgcataacttagattcgcaagatatcttctggtcattcaaaaacaatttgcgatatagatattcttataccatgagatagttatctggaccgctctcaaccatgcaagattaaatcagtgaaacataatcatatttgataacgagaaatgcatttttaaatgccttactcagaattatagcaaatacagattaatcgcaatttttcccggcaaaattacaaaatcatggtgtattgacatcatcaataaccaatgaaattatgcaattatatacggatagggaggttcttaacatggggctttgtagtcgttataaaagtcttacatgcaatagttgcagtatgcattgccaaataatgccagaagagagtccgcgtttgcagtattgcgcaaacagctgtttttgtatgtggcccgaagaaagtagttattttaatcgtggtgtggtagaaggtatcttaacaaaaaaccacaatgcgagattaagcggatatatttttgtcgattttagtgtaagttttttacgtctattccttgaaaaagactggattgactatcttgcaagtactgacatggggattgttttagtcagcgaccgcaatatgcaaagcttagctaattactggcgaaaacacaacagtgcaatatctgctgtcatatataatgatgatggtcttgatgttgccaatgaaaagatcagacaactatttattggtcgttatttaagttttaccggaggtaacacattaactcagatggaattcaccataatggggtatatggtttctggttataatccatatcagattgctgaagttctggatatggatatccgtagcatctacgcgtacaagcaacgaatcgaaaagagaatgggtggtaaaataaacgaattatttattcgtagtcatagcgtccaacattgatactcaacgaccagccagaatcatactctgtttatacgggcatttattgaaatgtccgtattttataaataggccgtcccctcaagagtaaacaccatagtatttaaaaccatcacacgaaaaattcagaagcattacgaaatatgaatttacaaacaatagtggcataaatgttaaccatgttaatttacgtaaagttttacgttgcaacattaaagcctcatttcaatcatcatgataaatataaaattaatatatatttatgccgtaaataccaatatacttagcaaactatgtgatctccatttcgattgatttagtgtttattgacgtatgtactggattattaacgataatatcgagttctggcctgagcaccgaaaattaataagcgtacataacgccgatcttaacgtcgttctgacaacgccagccagtcgatgtttaagtcttctacttgaagcttttcctgatgtggttgcacaacaagattttttcaccagagtctgggaagaagaaggtatgcgtgtgcctactaacacgttatatcagaacatatccattatcagacgcggatttcgcgctgttggtgatactacccacagcctaattgcaaccgtgccgagaagaggattcaagatccataatgacattaacatacaaaatcatgtaataaacagcagtacagacgcacatacacacaatgccccacctgccataaaagttaatgcgggatacaaagagagcattggtggcgcaaagaatttcaataacaaaatcctcaaacatataaaaagtcatctaattatgttgagcgcatttgtcataggcgcatattctgcatattggctatggaataataatcaaccgaagccatttttcaaggattacaagactgttgcggaaattaatggctgccattttaatgtaacagaagatacaattgatgggttgaaagagttcgataaatataaaacacggatactggatagcgggattaactgtaaaaaacatccgtggttatacttccctcttgcaaaatccagtccggggatgattgttatggcatgcaataaaaactataaccaacatgaagtggcaaactgtttaaccctgtcttaccgtgaggttaatcgtgattgattataaaaaaaacttattatttattttagtttttatcagtgggtttattctcttcactgtctattcttacactgcagaaaaaatgatatataacgaaacatgcactgcaaattgggtaatttttaatgaccagggacgagcaaatcttaccatcgactttatgtataacaaaaaaaataaaacaggaactgttgcgttgagtggaacctggcaacaaggtaacagagaaagtaaaagtatacggcgaaatattgaatacacatggattgaaaactatgacacagcccatttaacaagtaagaaagttaataagtttgagattatggatcaagttgatgatgatagacttgcacaacttattcctgatttttatgtctttccagaaaaaagtgtaagctataatatactaaagcaaggtaagcatgcttttattttgagcattggtaacagagcaataatgcattgtgcaaggtaaactaaaatagataacaaaaagatggaacctcgttaatcataaaacaataaaattaaatattctcgcagtatatggcagtctaaagcatcaaagatttgatcaacatctttcattttagacatctccttgcaatgtaaaatatcatgtatcaacaacatctggtgcaaatccaactgtcgaactcgacattcatcttagctcgattattattccttcgtacagtgcttgtaaacaatacagaaagaggattattaagaaccagtttactcagactatcaatagaggaaaggactaacgtttctttaaaagaattgatttcatcatctgttaaactaaactcatcattgacagatcgactgatataactgtttttaactttactctttacgttgactttattgacagaattaacattcacatatctactatttaatgtccaacttgttgtttgcgtgagaacattctcagcattaaggaatttttttaacggaatccttggtttctttttgctgtcgctatttacaatatcatgcatatagaccatttcatgaatctggctaaattcaatgtccattgtatacctcacatttttaccgtgactcgatgttactgttcaataatcaccttccatcaatactaaaattaatacccctaatgtgccgataacaaatatagtcattctacgtaacgtctccataaggtgatatttgacattatcagaagctgcgaattcggattttgctctaatcaaatgagagaaatgtaaaatgaagccacgaaatattaataatagcctaccactgcaaccattagttcctgatcaggagaacaaaaataagaaaaatgaagagaaatccgttaatccagttaaaatcacaatggggtctggtttaaattatattgaacaagaatctcttggaggaaaatatctaacacatgatttgagtataaagatagcggatatttctgaagagataattcagcaagcaatattatctgctatgagcatatataaatttagcataacagatgatttaatgagtatggctgtaaatgaactcataaaactgaccaaaatagagaataatgtagacctgaataaattcactactatatgcacagacgttctatccccccgcgtcaccagacataataaagaaaaaaacaaacgacattctacccttctcaaaaatcccctttttaattttcattgaaaaaatggcaattgatactatgaatccaggtcatacacattaaggcatttatgtaatgtcgtaattaagataactaataaggtgaatattagtaaaacaactaatgatgttattagtttgtagtgaacagtacttttaccaataatgaaaaatataccataagcaatgcaagcttaaaactcataatttaaaaaagataaatataaaaatatcaatgagtcaatcaataataatttggcatcacgagacacatcacagaggaatattatgagcacagaaacaattgaaatattcaataatagtgatgaatgggcaaatcaactaaaacacgcattaagcaaaggagaaaatctggcattactacatggtttaactcctgatatccttgatagaatatatgcatatgcattcgactaccatgaaaagggtaatataacggacgcagaaatttattataaattcttgtgcatttatgcgttcgaaaatcatgagtatctaaaagattttgcaagtgtatgtcagcccaaaaagaaatatcaacaagcatatgacctttacaaactaagttacaattacttcccgtatgatgactatagtgttatttatcgtatgggtcaatgtcagattggggctaaaaatatcgataacgcaatgcaatgtttctatcacattattaacaattgtgaggatgatagtgttaagagtaaagcgcaggcatatattgaactcttaaacgataatagtgaagataatggctaagcattacaatcatttggttaaatttgctggttatagtgcagttaaccactataaccagcacctcttatgttttcttaaatcagcatcttaaaacagttaagagcatactataaatcattatttttcaatgcgttagagaacaatctactttatcaaaattgaataaggctatttcagattacatcactgaattcctaagataaattagtgaacacaaccatagatatgtcaaatgtaatttcctgtagcgttaatgacacataaatatgaatagccataatttctattgcttaagcaggatgcaagaaaccaattttttcatagaggttaactaatggacttagaaaataaattcagttatcattttcttgagggattaacgctcacggaagatggaattcttactcaaggaaatgagcaagtttatattccacagaaagagttaggtgtattaatagtattacttgaatccgctggtcatgttgtactgaaagatatgatcatcgaaagtgtatggaaaaatattattgttagtgacgagtccctgacaagatgtatctattctttgcgctgcatttttgaaaaaattggctatgatcgttgcatagaaacaatctaccggaaaggttatcgtttcagcgggcaggttttcaaaactaaaattaatgaagataatactagtgactattccatagctatattccctttcactactagtttgaatacactggatccattaatacttaatcaggaattagtgcaaatcattagtaataaaaaaatcgatggtctctatacctatccgatggctgcgacaaatttttgtaatgatcacatatctcaaaatagtttcttgagcagattcaagccagattatttcgttacaggaagaataaaccagaataatgcagtgaacactttatacattgagttgatcgacgctaaaaaccttttcctcatcgccagtaatcatctccctgttgatgaactacataatacaagtcaatttattatagataatatccttcaaacggtacataaaccagaacgatctgtaagattagctaagcaggaccaaggatataagaatcattatttaagtgatgaaatgttagccggaaagaaagaactttacgacttcacccctgaaagcatttacagggccatgactatatttgatagattacaaaataaaagtgatatacagacgctaaaaacagaatgttattgccttctagcggaatgccatatgtctttggcacttcatggaaaaagtgaacttgaacttgctgctcaaaaagcattagagcttttagattatgtaagtgacataaccactgtcgatggaaaaattttagctattatgggactgataactggtctgtctggacaagcaaaagtatctcatatcttatttgaacaggctaagatacacagtactgatatagcctctctctactactatagggcactagtccactttcataatgaaaaaattgaagaggcaaggatttgtatagacaaaagtctacaactcgaacccagaagacgaaaagcagttgtgataaaagaatgtgtagatatgtatgtgcctaacccgctcaaaaacaacattaaactctactataaagaaactgagagtgaaagccatcgagttataattgacaacattttgaaattaaagcagctgacgagaatttgtatgcgataaatttttattgacgcaattttattatttagatgtatgcaacttgttatttaaacaacagagataaaaatatctaagatattcaccttattgcaagatatttaaaatgctctagagttaaaagtatgatgtaaagaccattggcctggacaattaaaaaagggagctttatgactaatccaatcggtatcaataatttatctcaaagtagtaatatagcgaatgcaacgggtgatgaagtcgtaagtttagataaacacatcaacaccagtgctactgatacagatcaaatacaagcatttatagttagtacatggatggcgccttttcaaaatgatatgtatagtgaagataatcctatcagtccttactataaaattgagtggtaaacgattgaccaaataaatcataacgagatacttttataatagtatctcgttcctttcattcaatcctcacacatgaaaaaatatgcgctcaccaaaagttaaattcttaaccatcttcacgttttgtatatttattacaaaaatgtctttcgccagcaactcttgctctaatgaagcaggaacaatgttcagaatcgaaccaaatttaattaaagctatcgctcttgttgaaagcaatctaaaaaaggatagcataggcaagaacagagataagaataacaatataaagagtttagattattggttaatgcagataaaccagatgcatattcccctgttaaaaaaacgtggaataataaaagatgaacgagatttgttagataacccttgtctgaacattaaaataggaaccgagattttatataaccattttagtcgttgtggagtaacgtggcaatgcctggggacttataatgcgggttttgcaatggataaccaaaaaaagagacagcaatatgccccaaaatatatattgtatataccaggcttaatgaactaaacaatcgtaaggcttcagcaaaatgagcctaaagcctcttttttttatatagtgcaaacacccatacgtaaagctgttttgatcaactcgataccactgtgaacatctaatttcttcatgatattgagtctatgagtttcgactgttttcctgcttaactgcaagaaattagcgatttctttgtttgttttaccatcagctatgagttgtaatatttcactctcacgatttgtaagttgattatcagaggaatacctggaagatattttttcacaatccatatgtacactatcaaaataagtgtaaccattactaatgctatcaatagcacgatttagtttcgccgggtgactggttttccatacgcatcctttcgcacctgcttcaagcaattttatactatcaatatacggcatctttgctacaaatgtaataatatgagcatctatcttatggcttttaacccattttacgagttcggcccccatcattccacctgcaaattctcctaaaataaatatttaggctgtagatttgttacactccgctatagctttcttcagatctttatagcccacttatttaacaacttgaaaataaggtgttttacctgggttgttacaaaaggattgcattgcgtaaacgctttttatttacaacaaaatggggaagtattacggcgaagataaattggagcgggcgaagggaatcgaaccctcgtatagagcttgggaagctctcgttctaccattgaactacgcccgcttcgagatgcgtaaggcattataaaccttacgctctccttagcaagtgccacgctgctgactgctgattaattcgccatcagcattttggcttgctgccctgaggcggcaagtaacgtagcggatcaattgccgttgcacggtaacgaatctggaaatgcaggcgaacagatgccgcatccgtgctccccatagtggcgattttttgcccagccttcacgctttgcccattatttaccagcatcgtgtcattatgggcgtaagccgtaatgtaatcttcactgtgtttaatcatgatgagattaccgtagccacgcagctggttgcccacatacaccacctttcctgcacccgcggcgtaaataggtgtaccccgtggagcactgatatcaatccctttattgccgccatctgctgtgctatacggcatgataactttccctgtcgttggccataaccaacaacgttgccctactggcggccaggaacttttcggtaccgcactactcggtgtaacgcttgcggttttggtcgtacttttggcggtacttttacgtgtaatactgctacttttcgccccacccagttttagtttctgaccaacttcaatggtgtaagggggggaaatgccgttcagtcgcgccagttcttttacgctggttcccgtggtgcggctaatacgatatagcgtatccccccgtttcacggtgtaaacggagccggaatacgttcctgtatcggaacttttgctaccgctacagcccgccaaaagcagtccaacgcttaacaacatcacgatacccagagattttttattcaggcgtcccgcactcaaaatctttcctcgcttaaaaaacaagacgccttatcatagcagccagcctcttgatacccaatctcttgcttctggaaaaacgtggtaatagagaaagaggttaatttcatttggcaaagggaagtatcatcagcaaaatattcgctgtagaggtatcgaacttcctgactttttaccctatttcccatcctgatgcgtaataatcccaatttatcacattgattttatcgccactcatattgatacgtatcactgcccctattcagagtcctgtttcgtatcatatctgtgtttttttaacgtcatcacacttcctacctcccctaacgcttatcgtcgtttctggcgtaaatcttgcctgcttagactaaatctttgccataagaaccaaatgttcaaatcgaggggatttctatggaagcgcgggaagcaaccgctacgggtgaatcatgcatgcgcgtcgatgccattgctaaggtcaccgggcgggcacgatatactgacgattatgttatggcgggcatgtgttatgcgaaatatgtacgtagccctatcgcacatggttatgccgtaagtattaatgatgaacaagccagaagtttgccgggcgtactggcgatttttacctgggaagatgtgcctgatattccattcgctacagctgggcatgcctggacacttgacgaaaacaagcgcgataccgccgatcgcgcactgctaactcgccatgttcgtcatcatggtgacgccgttgccatcgtcgtggcccgcgatgaactcacggcagaaaaagcggcgcaattggtcagcattgagtggcaagaattacccgttatcaccacgccagaagcggcgctggcagaagacgctgcaccaatccataacggtggcaatttactgaaacaaagcacgatgagcacgggtaatgtccaacaaacaatcgatgccgccgactaccaggtacaggggcactatcagacccccgttattcaacattgtcacatggaaagcgtaacaagcctggcgtggatggaggatgacagccgaattaccatcgtttccagcacccagatcccgcacattgttcgccgcgtggttggtcaggcgctggatattccctggagttgcgtacgagtcatcaaaccatttgtcggtggcggttttggtaataaacaggatgtactggaagagccaatggcggcattcctgaccagcaagcttggcggcattccggtgaaagtttcccttagccgtgaagagtgtttcctcgcaacccgtacccgccacgcttttaccattgacgggcaaatgggcgtgaaccgcgacggaacattgaaaggttatagtctggatgttctgtctaacaccggcgcttatgcatctcacgggcactccatcgcttctgcgggggggaataaagtcgcttacctttatcctcgttgtgcctacgcttacagtagtaagacctgctataccaacctccccagcgctggtgcgatgcgtggttatggcgcgccacaagtcgtatttgccgttgagtctatgcttgatgacgccgcgacagcgttaggtattgatcctgttgaaattcgtttacgcaacgccgcccgcgaaggagatgctaatccgctcacgggcaaacgtatttacagcgcagggttgccggagtgtcttgaaaaaggccggaaaatctttgaatgggaaaaacgccgtgcagaatgccagaaccagcaaggcaatttgcgccgcggcgttggcgtcgcctgttttagctacacctctaacacctggcctgtcggcgtagaaatagcaggcgcgcgccttctgatgaatcaggatggaaccatcaacgtgcaaagcggcgcgacggaaatcggtcagggtgccgacaccgtcttcagccaaatggtggcagaaaccgtgggggttccggtcagcgacgttcgcgttattagtactcaagataccgacgttacgccgttcgatcccggcgcatttgccagtcgccagagctatgttgccgcgcctgcgctgcgcagtgcggcactattattaaaagagaaaatcatcgctcacgccgcagtcatgctacatcagagtgcgatgaatctgaccctgataaaaggccatatcgtgctggttgaacgaccggaagagccgttaatgagcttaaaagatttggcgatggacgctttctaccaccctgaacgcggcgggcagctctctgctgaaagctccatcaaaaccaccactaacccaccggcgtttggctgtacctttgttgatctgacggtcgatattgcgctgtgcaaagtcaccatcaaccgcatcctcaacgttcatgatagtgggcatattcttaatccactgctggcagaaggtcaggtacacggcggaatgggaatgggcattggctgggcgctatttgaagagatgatcatcgatgctaaaagcggcgtggtccgtaaccccaatctgctggattacaaaatgccgaccatgccggatctgccacaactggaaagcgcgttcgtcgaaatcaatgagccgcaatccgcatacggacataagagtctgggtgagccaccaataattcctgttgccgctgctattcgtaacgcggtgaagatggctaccggtgttgcaatcaatacactgccgctgacgccaaaacggttatatgaagagttccatctggcaggattgatttgaggataacatcatgtttgattttgcttcttaccatcgcgcagcaacccttgccgatgccatcaacctgctggctgacaacccgcaggccaaactgctcgccggtggcactgacgtactgattcagctccaccatcacaatgaccgttatcgccatattgttgatattcataatctggcggagctgcggggaattacgctggcggaagatggcagcctacgtatcggctctgcaacgacatttacccagctaatagaagatcctataactcaacgtcatctcccggcgttatgtgctgcggccacgtccattgctggaccgcagatccgtaacgtcgctacctacggtggaaatatttgcaacggtgccaccagcgcagattctgccacgccaacgctaatttatgacgcgaaactggagatccactccccgcgcggtgttcgtttcgtcccgattaatggctttcacaccgggccgggcaaagtgtctcttgagcatgacgaaatcctcgtcgcctttcattttccgccacagccgaaagaacacgcgggcagcgcgcattttaaatatgccatgcgcgacgcaatggatattagtacgattggctgcgccgcacattgccgactggataacggcaatttcagcgaattacgcctggcatttggtgttgccgcgccaacgccgattcgctgccaacatgccgaacagactgcacaaaatgcgccattaaacctgcaaacgctggaagctatcagcgaatctgtcctgcaagatgtcgccccgcgttctagttggcgggccagtaaagagtttcgtctgcatctcatccagacgatgaccaaaaaagtgattagcgaagccgtcgccgcggcggggggaaaattgcaatgaatcacagcgaaacaattaccatcgaatgcaccattaacgggatgccttttcagcttcacgccgcaccaggcacgccgctcagcgaattactccgcgaacaaggactgctaagtgtcaaacaagggtgctgcgtgggtgaatgtggtgcctgtacggtgttggtcgacggcacagcaatagacagttgcttataccttgccgcctgggctgaaggaaaagagatccgcacgctggaaggtgaagcgaaaggcggaaaactttctcatgttcagcaggcttatgcgaaatccggcgcagtgcagtgcgggttttgtacgcctggcctgattatggctaccacggcaatgctggcgaaaccacgcgagaagccattaaccattacggaaattcgtcgcggactggcgggaaatctttgtcgctgcacggggtatcagatgattgtaaatacagttctggattgcgagaaaacgaagtaaaaggatatccggcctgaattcaggccggattcactgaggttatgtgtttaacaactcatatttcttaatcttgcgatagagcgtagcaatgccgatgcccagttcatcagcaacttgcttcttgctgttatgacgactaagcgcctcgcggatcatttgcttttccatctcctccagcgccgtgccgcccgcatcatcgagactcaggtgcgcctcactgacctctgttacatcactttgctccgttgtgccattattcagcagatttggcggcaatagcgtgctgtcgataacttcaccactaggaaccacgttaaccagatattccatcaaattgcttaactcgcgcaggtttccgggccaacgatgcttacgcaatatttcgacgacatcgggagcaatgccaggataaacgcttcccagacgacgggtatgcagatgtaaaaagtaatgcaccaatagttcaatatcttcctgacgttcacgcagcggtggcagagttatcgggataacattaagtcggtagaagagatcttcgcggaatttaccttcggcaatgaactgggccaaattctgattagttgcagaaatgatgcgaatgtcgacttgtattgggctactggcaccaatcggcagaatttcacgtgcctcaatagcgcgcagtaatttagcctgcaacattaatggcatatcacctatttcatcgagaaacagcgtgcccgtattcgccgcctgaatcaaccctgttttaccgttggcagaagcgccagtaaatgcacctttaacataaccgaacagttcgctctccagaagctgctccggaatcgcggcacagttgatagcaataaagggtttattccgtcttccgctcaacttatggattgcacgggcgacgacttctttacccgtgccgctttcaccaaccaccataacgctggatgggctgggtgcaatacggctaatgagtcgttttaattgccgcataacacggcactcgccaaccaattgttcaatatgcggttcatcaggtgcatttgctacagaaaaactggtatggctttggtgaaacgccattaaaaataattgtcggccctgaatgttatgcaattgaccaatgattaattcacttttatcgtcccaactaacaatatgctgcatatgtccatgggtaaaattactctcaaatgttaatggtctgaaacggataggtttcccaataatattattttgcacaacaccaagtgtttttaaggcagtctgattaacaaactgaacccgattttcatcatctacaactaatacgccctgatccatattatcgatcatggtcgcaaatattttactgatgttatctcctggcccctgatcctccagaagtttgctaacaaaaatggtggatatatggcgaacataatcagaaaattcgcgtaaattatcactgatatgctcttgttgctcgtgggtaacggcaatcaaacttatcaccccaacacaacgatcctgtaaaatgacaggcgtacccagaaatgctttttcgcggcaattttctttactatcgcaaccttcgcaaaggggatcgaagcgagactgtgtcacaactttttcagttttcgtttccaggacgtggcggagcaggcgactgttgccgctcaactggcgaccaagaaacttcccatacgcgcccgttccggcaacgcgacacaagttttcatcaacgatctcaacctcaagctgcaaaaacgctggcaagcattctggcaaaacgctgaattgtcggttgaatttgcatcaatacactctgcgtagtagcaagctccatagctttaccttccagacttacttaaaagtcgatcattgaagacgttgatggttcacagatcatgatgatattaactcaggcgaaattggctttgataaaaacataagatttttatcattttctaatgaaattatggaagagatatcacatttctatatcaatatgagaattacggcggtgagtttatcaaactgaagagagatagcctgcccctttatcttatttctgatacttagcagcaaataaataacgcgataaaaaaagccaaacgttttcgtattttacaaacaaccagaagctggcatcaatttgtgatcaaccccacacattatccgtcaaattagtcttttgcagccgcgcggataattctggcacacttattgttagtcccaggtatagctgtgaaaacaccaatcactttggcaagtcacagtgaaataaaccactttgcctgtcattccactaccgggactttatgatgaaaactgttaatgagctgattaaggatatcaatagcctgacctctcaccttcacgagaaagattttttgttaacgtgggaacagacgccagatgaactgaaacaagtactggacgttgccgcagcattaaaagcactgcgtgctgaaaacatcagtaccaaagtctttaatagtggattaggtatttccgtattccgcgacaactccacccgtacccgcttctcttatgcttccgcgcttaacctgctcggccttgcacaacaagatctcgacgaaggcaaaagtcaaatcgctcacggcgaaaccgtgcgtgaaaccgccaatatgatctccttctgcgccgacgctattggtattcgcgacgatatgtatctgggcgcaggcaacgcctatatgcgtgaagttggcgctgcacttgatgacggttacaagcagggtgtactgccacagcgtccggctttagtgaacctgcaatgcgatattgaccacccgactcagagtatggctgacctcgcgtggttacgtgaacactttggtagtctggaaaacctgaaaggtaaaaaaatcgccatgacctgggcctactctccaagctatggcaaaccgctctctgtaccacaaggcatcatcggtctgatgactcgcttcggtatggatgtcaccctggcccatccggaaggctacgacctgatcccggatgtggttgaagtggcgaaaaacaatgctaaagcctccggtggtagcttccgtcaggtcaccagcatggaagaagccttcaaagacgcagacatcgtttatccgaagagttgggcaccttacaaagtgatggaagagcgtactgaattgctgcgtgcgaacgatcacgaaggcttaaaagcactggaaaaacagtgtctggcacagaacgcgcaacacaaagactggcattgtactgaagagatgatggaactgacccgtgatggcgaagccctgtacatgcactgcctgccagctgatatcagcggcgtatcctgtaaagaaggtgaagtgactgaaggcgtattcgaaaaataccgtatcgctacctacaaagaagccagctggaagccttatatcatcgccgcgatgatcctgtcccgtaaatacgccaaaccaggtgcactgctcgagcaactgctgaaagaagcgcaagaacgcgtgaaataacccctcgggccgatcagctggtcggccctctatttccagaggccaaaaggataggatatgtccgttttcagtttgaagattgatatcgccgataacaaatttttcaacggcgaaacaagtccgctctttagccaaagccaggccaaactggcgcgccagttccaccagaaaatagctggttatcgcccaacaccgctttgtgcgctggacgatctcgcaaacctttttggtgtgaagaaaattctcgtcaaagacgaaagtaaacgattcggtctgaacgccttcaaaatgcttggcggtgcgtacgccatcgctcaattattgtgtgaaaaatatcatcttgatatcgaaacgctgagttttgagcacctgaaaaatgccatcggcgaaaaaatgactttcgcgaccaccaccgacggcaaccacgggcgcggtgtggcgtgggcagcacagcaactcggacagaatgcggtgatttacatgccgaaaggttctgctcaggaacgcgttgacgccattctgaacctcggtgccgagtgcatcgtcacggatatgaactatgacgataccgttcgcctgaccatgcaacacgcgcagcagcacggctgggaagtggtacaggacacggcatgggaaggttacaccaaaatcccaacctggatcatgcaaggctacgcaaccctggcagatgaagccgtcgagcaaatgcgtgaaatgggcgtaaccccgacgcacgttctgctgcaagccggtgtcggagcaatggccggtggtgtgctgggttatctggtcgacgtctatagcccgcaaaatctgcacagcattattgttgaacctgacaaagctgactgtatttatcgctccggcgtcaaaggcgacatcgtcaacgttggcggtgatatggccaccatcatggcaggcctggcctgtggcgaacctaacccgctgggctgggaaatcctacgtaactgcgccacccaattcatctcctgccaggacagcgttgccgcattaggtatgcgcgtgctgggtaatccgtacggcaacgacccgcgcatcatctccggtgaatccggcgctgtcggtttgggcgttctcgcagcggttcattatcacccgcaacgtcaaagcctgatggaaaaactggcgctgaacaaagatgccgtggtgctggttatcagcactgaaggcgacaccgacgtgaagcactaccgcgaagttgtctgggaaggcaaacacgctgtagcaccttaatcaccctattggaactgctccctgcaaaacggggagtaaaaaatctggagaaaaataatggctaagaatattccattcaaactgattcttgaaaaagcaaaagattaccaggcggatatgactcgcttcctgcgcgacatggttgctattcccagtgaaagctgcgacgagaaacgcgtagtacatcgtattaaagaagagatggaaaaagtcggcttcgataaagttgaaatcgacccgatgggcaacgttctcggttatatcggccacggcccgcgtctggtggcaatggacgctcatatcgataccgtcggcattggcaacatcaaaaactgggacttcgatccgtacgaaggcatggaaactgatgaactgattggtggtcgcggtacttccgaccaggaaggtggcatggcctctatggtttatgccggtaaaatcattaaagacctcggtctggaagatgaatataccctgctggttaccggtacggtgcaggaagaagactgcgacggtctgtgctggcagtacattattgaacaatccggcattcgcccggaatttgtggtcagtaccgaaccaaccgactgccaggtataccgtggtcagcgcggtcgtatggaaattcgtattgatgttcagggtgttagctgccacggttctgcaccagaacgcggtgataacgccattttcaaaatgggtccgattcttggcgaattacaagaactctcccaacgtctgggttatgacgaattcctcggcaaaggcaccctcaccgtttctgaaatcttcttcacatccccaagccgttgcgctgtagcagacagctgcgcagttagtatcgaccgtcgtctgacccggggcgaaacctgggaaggcgcgctggacgaaatccgcgccctgcctgcagtacagaaagctaacgcggttgtttctatgtacaactacgaccgtccgtcctggactggcctggtttacccaaccgaatgctacttcccgacctggaaagtggaagaagatcacttcaccgttaaagcactggtgaatgcctacgaagggctgtttggcaaagcgccggttgttgataagtggaccttcagtactaacggcgtatctatcatgggccgtcacggcattccggtgatcggctttggcccgggtaaagaacctgaagcgcatgcacctaacgaaaaaacctggaaatctcacctggtgacctgtgccgcgatgtacgctgcaatcccgttaagctggctggcaacagagtaattactcttcacttattcccctccggttcgccggagggtttttggagtttgctatgcgcgtattgatcaaaaacggcactgtcgttaacgcagatggacaagccaaacaggatttgctgattgaaagcgggattgttcgccagttgggcaacaatattagcccgcagctcccgtatgaagaaattgatgccactggctgttacgttttccctggcggcgtggatgtccatacgcatttcaatattgatgtcggcatcgcgcgcagttgtgatgatttttttaccggtacccgcgcagctgcgtgtggcggtacaacaaccattattgaccatatgggatttggcccaaacggctgtcggttacgccatcaactggaggtttatcgtggttatgccgcccataaagcggtcatcgattacagctttcacggtgtgatccagcacattaatcacgcaatcctcgacgaaatcccgatgatagtcgaggaaggactgagcagttttaaactctatttaacctatcaatacaaactcaacgatgacgaggttttgcaggcattacgccgcttgcatgaatccggcgcgctgaccaccgtgcacccggaaaatgatgcggctatcgccagcaagcgggcggaatttatcgccgcagggttaaccgcgccgcgctatcatgccttgagtcgccctctggaatgcgaagcggaagccatcgcccgcatgattaacctggcacaaattgccggtaacgccccgctctatatcgtgcacctgtctaacggcttaggtctggattatctgcgtcttgcccgtgcgaatcaccagccagtctgggttgaaacctgcccacaatatctcctgttggacgaacgcagttacgatacagaagatggcatgaagttcattcttagcccaccgctgcgtaacgtacgcgagcaggacaaactgtggtgtggcatcagcgatggtgcgattgacgtggtggcaaccgatcactgcaccttcagcatggctcaacgcctgcaaatttctaaaggcgatttcagtcgctgcccaaatggcttacccggtgtggaaaaccgcatgcagttactgttttccagtggcgtgatgacgggacgtataacaccggaacgctttgttgaattaaccagcgcaatgcccgccaggttgtttggcctgtggccgcaaaaaggattattagcgcccggttccgacggcgacgtggtgattatcgacccacgtcagagccaacaaattcagcatcgccatctccacgacaacgccgactacagcccatgggagggttttacctgtcagggcgcgattgtcagaaccttatcccgtggtgaaacgattttctgtgacggcacctttacaggcaaagccgggcgaggtcgtttcctgcgacgcaaaccgtttgtccctcccgtgctctaaccactgccagggatctatacacaatcaagaatgatgagtgaggaaaaatgagtaagaaaattgttctcgccctgggcgggaatgcgctgggcgatgacctggccgggcaaatgaaagcggtaaaaattacttctcaggcaattgttgatttaattgcccagggacatgaagttatcgtcactcatggtaacgggccgcaggtgggcatgattaaccaggcctttgaagctgccgcaaaaactgaagcgcacagcccaatgctgccgatgtctgtctgtgttgcattaagccagggttatattggttacgatctacaaaacgctttaagagaagaactgctttctcggggcattaataaacctgtagcaacgctggttactcaggtcgaagtcgacgctaacgatccggcattcctcaacccgaccaagccgatcggtagcttctttaccgagcaagaagcagagcaactgacaaaacagggttacactctgaaagaagatgctggtcgcggctatcgccgtgttgttgccagcccaaaaccggttgatatcattgaaaaagaaacggttaaagctctggtagatgcaggtcaggtggtgatcaccgttggcggtggtggtatccctgttattcgtgaaggtaaccatctgcgtggtgccagcgcggttatcgataaagactgggccagcgcccgtttagcagaaatgattgatgccgatatgctgatcattctgactgcggtagaaaaagtggccattaacttcggtaaagagaatgaacagtggctcgatcgcctgagtttaagtgatgctgaacgctttatcgaagaaggtcattttgcgaaaggttctatgctgcctaaagtggaagctgccgccagctttgctcgctctcgcgcaggtcgtgaagcactgattaccgtattgagcaaagcgaaagaagggattgaaggcaaaacaggaacggtgatttgtcagtaatttaaaggccgggtgggtaataccatccggccaaagattgtcaagtaagtgcgctttgttgatgccggatgcggcgcgagcgccttatccgtcctacaaaacatcgcaaattcaatagattgcaatgcacttgtaggcctgataagcgtagcgcatcaggcaatttggcgtttgtcatcagtctcaggccgggtgggtaataccatccggccattttcatttaagccacttccagcacttcttttgtcgctttcacgccctgatgcatcaacatcattaacgcctcaagtacgccgccgccaatcgcccgggctttatcagaaacgctggtgaaatcagcggtttcaccacgaggatcgatatcaccaattttaaaaccaccaaccactgccaggccgtcgttcaacaagccacgcaccatccccgtcaacggtgctttaatttcatgctcaccaatccaggcaatcacatcgccctctttcaccagatcgcctaatttcacgttggatcgcataatgcctgcagcaggagcacggatcacccgtcgggtggtatgccccataatattgccaggaacaccggtattctcctgcgcacaaccagagtaaatcacctgaccgagccagtgcccgcgatttgtttcaattaccgcatgacaatccttcccagcagtaaagcccggcccaagcgcgattgttactggtgccatatctgcccgcgttcccaaattctgtttcgccagaatagcgtccaccacgcaaagcggtttcagttcatcaagcaaactacaggcgggatctaccatcacaggaatgaatccgcgttcggtaagtttcatcgcttccgcagagctggttgccaggcgagcagtgacgccttcgaccgtcatttcgccatcgaacacggcctgggcaaacgccacggtacaacgaatcactgtcggtttttccacttccagcatgatcactttaaaacccgcatgatacagacgtagcgccacaccactggcgatatctcccgcaccgcgaatcaccaccagctggtgtccggaaggatgagaaggtttcatcatcagcccacccggcgcgttatttttcacctgtaatatttctgccagcacgctgatggcgatctcctgcggcgtttccgcacctatgttgtaaccaacgggcgcatgtaaacgggcaatatgttcttcagccacgcctttctcacgcaattgacgcaggaaaagctgaaccttgcgacgacttgccagcaaccccaaccatgcaatgggctgttcaatgagtttgtcgagggcttcacgatcctgattattcgtggcaatcaggacaaaattatcagggcgaatatccagtgcttccactgccgcaccaaagctctcagcatggagaagcgtggtacttggtgggaatagttcaggattgaggctttcgcgataaatatcagcaacggcaatatcaaatcctaatagcgccgcactctgggctatcgcccggttgacatgccccgcgccaatcaacaccagacgtggacgcataccatggacgctgataaatacactcattgcacctccacaatcactcccgacagcatccgcaccgttacgagccatacgtccatggaataatcgcggcttacgttcctgcaatgcctgaaggctctcttcaatcaccttccgctcaaccattccgccaccaattgtaccgacgatagaaccatcggcgcgcactaacatttgtgcagaatggcggggagtgctgcctcggctatcaacaatttgcgccatagcaaacggacaattttgctcttcgagttttgcagcctctgtgaaaatattcataccaacctcaatggatatcctttcagtaacccggaatacccgggccgttaattcacaaatctgcgcgcgattgcaggatgttcttgtatatcgcccagccagattgcctctacgtcgtgttgttgcagcggttgaaggagctcgctttgtgcaatcgcattctcacattgagaaaaacggttaatgaaccagactcgccgacaaccttgcggtacgtttttaaacgccccctgagggtggcgaaccagcgcaacgagatcgctcagttgcaaggttgcatcaggtgttaacccggtaatatcagcaaactggctccagcgatggacattttctgtgctcactttcgcgcccaaagtatgtcctcccatcacagcaatcacgcagcaactgcttttgggtatgcaaggttcgtgctcatcaggcgcttttaacggcattccacggctgccatctgcttcaatgagaattacgtcacactctggtcgttgcaccagtgcatcaatcgcttctggcgtaaatccctgcacttttccctggttcgctttccagctgtgaaaacaaaaactaatgggggatgtaagagacgcatgaggaagcatggcgggatcacgacagaaaaccacgggccagtgagacgttggcataaacatatgtgtcgtcgtcgtgattaacacacgcctgccgctagcctggagcagttctgccagccaaaaaagcaagctggttttccccccagcaccaacaacagaaatcacagtgggacgtttctgcgcacctaaatcaatgactaatgcgcttgggtcaactatacttttcacgagtctttatgacctctctgggataaattatccccaacttaatccatcaggaagtaacgcaattatcaggcgttattagcccctataaataatggaaccactatgagtgccatcgactgtataattaccgctgccggattaagtagtagaatggggcaatggaaaatgatgttaccctgggaacagggaacaattcttgatacaagtatcaaaaatgcgttgcagttttgtagccgaattattttagtcaccggctatcgtggtaatgaactgcacgaacgttatgcgaaccagagcaatatcactattattcacaacccagattatgcgcagggtttactaacatccgtcaaggccgcagtacccgcagtgcaaacagaacattgttttctcacccacggtgacatgccaaccctcaccatcgatatttttagaaaaatctggagcttacgaaatgatggcgcaatactgccactccataatggcatccccggccatccgattttagtgagtaaaccatgcctgatgcaggcaatccaacgacccaatgtcaccaatatgcgtcaggcactccttatgggagatcattattccgtcgaaatagaaaatgcagaaataattttagatattgatactccggacgactttattacagcgaaggaaaggtatactgaaatttaaaaaacgtagttaaacgattgcgttcaaatatttaatccttccggcactcattatcataatgataaggaatcactgattttgagaaaagagaaaaattgataaatgggctggcaataataattttcaggagtgattttaattctcatttagcacctgtgagttcattcacaaaaagcccttaagtttcgagccgcctcacatttttttatatttcccgccaaacctggcaagagtggtgcgattgttgctctatccccctaaaccaccggatttctcaacaccggtcactcaatgatatctgtataagctaaggagagggttatgggggatattatgcgtcccattccgtttgaggaacttttgacgcgcatatttgatgaataccaacaacaacgcagtatctttggtattcccgagcaacagttttacagtcctgtaaaaggtaaaactgttagcgtcttcggtgaaacctgtgccactcccgtcggccctgccgctggcccgcacacgcagctcgcgcaaaatattgtcacttcctggctgactggcggacgcttcatcgaactaaaaaccgtccaaattcttgaccgcctggagctggaaaagccctgtatcgatgccgaagacgagtgctttaacaccgaatggtctaccgagtttaccctgcttaaagcctgggatgaatacctcaaagcctggtttgccctgcaccttctcgaagcgatgttccagccttctgattccggtaaaagcttcatctttaatatgagcgtcggttacaacctcgaaggtattaagcaaccgccgatgcaacagttcatcgacaatatgatggacgcatctgaccatccgaaattcgctcaatatcgcgatacgctgaataaattactccaggatgacgcatttttagctcgccacggattgcaggaaaaacgcgaaagcttgcaagccttacccgctcgcatccccaccagtatggtgcatggcgtcaccctctccaccatgcacggctgtcctccgcatgaaatcgaagccatttgccgctacatgctggaagaaaaagggctcaacacctttgtgaaacttaacccgaccttactggggtacgcgcgtgttcgtgagatcctcgatgtctgcggtttcggttacataggcttaaaagaagagagttttgatcacgacctcaagctgacgcaagcactggaaatgctggaacgcctgatggcactggcaaaagaaaaaagtctcggctttggcgtaaaactgactaacactctcggcaccatcaacaataaaggcgcactgcctggtgaagagatgtatatgagtggccgtgcgctgttcccgctctccatcaatgttgcagcagttctctctcgcgcctttgacggcaaactgcccatttcttattccggtggtgccagtcagctgactatccgcgatatttttgatacaggtattcgccctattactatggcaaccgacctgctgaaacctggcggctatctgcgcttaagtgcctgcatgcgcgagctggaaggctccgacgcctggggacttgaccatgttgacgtcgaacgactgaacagactggcagcagatgcgttaaccatggaatacacccagaaacactggaagccagaagagcgtattgaagtggcagaagacctgccgctgaccgactgctacgttgccccctgtgttactgcctgcgctatcaagcaagatattccggaatacatccgtctgcttggcgaacaccgctatgccgacgcgctggaactcatctaccaacgcaacgctctgcccgccattaccggtcatatttgcgatcaccagtgccaatacaactgtacccgcctggattacgacagtgcgctgaatatccgcgaactgaaaaaagtcgcgctggaaaaaggttgggatgaatataagcaacgctggcacaaaccagccggttctggtagtcgccatccggttgccgtgattggtgcaggtccggcgggtctggcagcaggttacttccttgccagagcgggccatccggttacgctgtttgaacgcgaagccaatgcgggcggcgtggtgaaaaatatcattcctcagttccgtattcctgcagagttaattcagcacgatatcgattttgttgccgctcacggcgtgaaatttgagtatggctgcagtcccgatttaaccattgagcagttaaaaaatcagggcttccactatgttctgattgccaccggcactgataaaaatagcggtgtgaaactggcgggcgacaaccaaaatgtctggaaaagtctccccttcctgcgtgaatacaacaagggtacagcgctcaagctgggcaaacatgtggtcgttgtcggggcgggtaacaccgcaatggactgcgctcgtgcggcgttacgcgttccaggcgtagaaaaagcaacgatcgtttaccgtcgtagtctacaagagatgcccgcatggcgcgaagagtatgaagaagcgttgcacgacggcgtagagttccgtttcctgaataatccggaacgtttcgatgctgatggcaccttaaccttgcgcgttatgagccttggcgaaccggatgagaaaggtcgtcgtcgtccggttgaaaccaatgaaacagtaacactgcttgtagacagcctgatcaccgccattggtgaacagcaggatactgaagccctgaatgcgatgggcgtgccgctggacaaaaacggctggccagacgtcgaccataatggcgaaactcgtctgactgacgtctttatgatcggcgacgtacagcgcggaccatcctccattgtcgctgctgtcggaaccgcgcgtcgggcgaccgatgccatccttagtcgggaaaatatccgttcccaccagaacgataaatactggaacaacgtcaatccagcggaaatctatcaacgtaaaggcgatatctctatcacgctggtgaacagtgacgatcgtgacgcgtttgtcgcccaggaagccgctcgctgcctcgaatgtaactacgtttgcagcaagtgtgtggatgtctgcccgaaccgcgccaacgtctccattgcggtcccaggcttccagaaccgtttccagacgctgcacctcgacgcttactgtaacgaatgcggcaactgcgctcagttctgtccgtggaacggtaaaccgtacaaagacaaaatcaccgtcttcagcctggcgcaagactttgataacagcagcaacccaggcttccttgtggaagattgccgggtacgagtacgtctgaataaccaaagctgggtgttaaacatcgacagcaaaggtcagtttaacaacgtaccaccggagctgaacgatatgtgccgcatcatcagccatgtccaccagcatcatcattatctgctgggccgcgtggaggtgtaatcatgttgattctgaagaatgtcactgcggtacagctacacccggcaaaagtgcaggaaggcgttgatatcgccatcgaaaacgatgtgattgtcgctatcggcgatgccctgacgcaacgctaccccgacgccagcttcaaagagatgcatggccggattgtgatgccagggattgtctgcagccacaaccatttttacagcgggctttcccgcggaattatggcaaacatcgcccctttgcccggatttcatcagtacgctgaaaaatctctggtggcggctcgatcgcgcccttgatgaagagagcctctattacagcggactgatttgttccctggaagcgattaagagcggatgtacaagcgttatcgatcaccatgcctctccggcgtatatcggcgggagactctccacattgcgcgacgcatttttaaaagttggcctgcgcgcgatgacctgttttgaaactactgaccgtaacaacggcatcaaagagttgcaggaaggtgtagaagaaaacatccgtttcgcccgtttgattgatgaggcgaagaaagcgacaagcgagccgtatctggtggaagcacatatcggtgctcacgcgccgtttaccgtgccggatgccggtctggagatgctgcgtgaagccgtgaaagccacaggccgtggtttgcatattcacgctgcggaagacctttacgacgtttcctacagtcaccactggtacggcaaagacctgctggcacgactggcgcaattcgatctcatcgacagcaaaacgctggtcgctcatgggctgtacttgagcaaagatgacatcaccctactcaatcagcgcgatgcgttcctggtgcataacgcccgtagtaacatgaacaaccatgtcggctacaaccatcaccttagcgacatccgcaatctggcgttgggaacggacggcattggtagcgacatgtttgaagagatgaaatttgccttctttaaacatcgcgatgcgggtggtccgctgtggcctgacagttttgccaaagccctgactaacggtaacgaactgatgagccgcaactttggcgcgaaatttgggcttctggaagccggttacaaagctgatttaaccatttgcgattacaacagcccgacgccgctgctggcagacaatatcgccgggcatatcgctttcggtatgggcagtggcagcgttcacagcgtgatggtcaatggtgtgatggtctatgaagaccgtcagtttaacttcgattgcgattccatttatgcacaagccagaaaagccgctgccagtatgtggcgtcggatggatgcgctggcataaatgacagatgccctcttcccgcagggaagagggttaaataaggaaagaagatgattgaacaatttttcaggcccgactctgtcgaacaggcgctggaactgaagcgccgctaccaggatgaagccgtctggttcgccgggggcagcaaactcaatgctacaccaacccgtaccgataaaaagattgccatttccttacaggatctggaactggactgggttgactgggataacggtgcactgcggattggcgcaatgtctcgcttgcagccactgcgtgatgcgcgatttattcctgcagcgctgcgtgaagccctcggttttgtttacagtcgccatgttcgtaatcagagcaccattggtggtgaaatcgccgcccgccaggaagagagcgtgctgcttcccgtcctgttggcactggatgctgaactggtttttggcaacggcgaaacgctgagtatcgaggactacctggcctgcccatgcgatcgcctgctaaccgaaattatcattaaagatccgtatcgcacctgtgcgacccgcaaaattagccgttctcaggcaggtttaaccgtcgtgacggcagccgttgcaatgacagaccacgacggtatgcgaattgcgctggatggcgtcgccagtaaagcactgcgtctgcatgatgtcgaaaaacaaaatctggaaggcaatgcacttgaacaggctgtcgccaacgccattttcccgcaggaagatttgcggggcagcgtggcctataaacgctatatcacgggagttctggtagccgacctgtatgccgactgccaacaggctggggaggaagccgtatgatcatccactttactttaaatggcgcgcctcaggagctaaccgttaatccaggcgaaaacgtgcaaaagctgttgtttaacatgggaatgcactctgtacgcaacagtgatgatggtttcgggtttgccggttctgacgcaataatctttaacggtaatatcgttaacgcgtccttgcttattgccgcacagttagagaaggcagatattcgtaccgcagaatctctgggcaaatggaacgagttaagtctggttcaacaggcaatggttgatgttggcgtggtgcagtctggttataacgatccagctgcagctctgattatcaccgatcttctcgatcgcatcgccgcacctacccgcgaagagatcgacgacgcgctttctggtttgttcagccgcgatgctggctggcagcaatactatcaggtcattgaactggcggttgcacgtaaaaataatccgcaggccaccattgatatcgctccgactttccgtgacgacctagaagtcattggtaagcattatcctaaaactgatgccgcgaaaatggtgcaggcgaaaccctgctatgttgaagaccgcgtaacggctgacgcctgcgtcattaaaatgttacgtagcccacacgctcacgcactgattactcatctggatgtcagcaaagctgaagccttaccgggcgtcgttcacgttattactcacctgaattgcccggatatctactataccccgggtggtcagagcgcaccggaaccgagtccgcttgaccgccgtatgttcggcaagaaaatgcgtcacgtcggcgatcgtgttgctgcggtcgtcgcagaaagtgaagaaattgcgctcgaagcactgaagctcatcgacgttgaatatgaagtgcttaagccggtaatgagcatcgacgaagcaatggcggaagatgcgcctgtcgtgcacgatgaaccggtggtgtatgttgctggtgcgccagatactctggaagacgataacagccatgcagcccagcgcggcgagcatatgatcatcaacttcccgatcggttctcgccctcgcaaaaatatcgccgccagtattcatggtcatattggcgatatggacaaaggctttgccgatgccgatgtgatcattgagcgaacctataacagtacgcaagcgcagcagtgcccgactgaaacacatatctgctttactcgtatggacggcgatcgtctggttatccacgcctccacccaggtaccatggcacttacgccgccaggtcgcgcgcctcgtgggcatgaaacagcataaagttcatgtcattaaagagcgagttggcggcggttttggttccaaacaggacatcctgctggaagaagtgtgcgcctgggcaacctgcgtgaccgggcgtccggtactgttccgctacacccgtgaagaagagtttattgctaacacctctcgtcacgtcgcgaaagtcaccgtcaaactgggagcgaaaaaagatggtcgcctgacggcagtgaagatggatttccgcgccaacactggcccttacggcaaccacagtctcaccgtaccgtgtaacggaccggcgctgagcctgccgttatatccgtgcgataacgtcgatttccaggtcaccacctactacagcaacatttgcccaaatggtgcttatcagggttatggcgcaccgaaaggtaacttcgctatcaccatggcattagcggaactggctgaacagttacagatcgaccaactggaaattatcgaacgtaaccgggtacacgaagggcaagagctgaaaattctcggtgcaatcggtgaaggtaaagcgccgacctccgttccttccgccgccagctgtgcactggaagagatcctgcgtcagggtcgcgagatgatccaatggagcagtccgaaaccgcaaaatggtgactggcacatcggtcgcggcgtcgccattatcatgcagaaaagcggtatcccggatatcgatcaggctaactgcatgatcaaactggaaagcgacggcacctttatcgttcattctggcggtgcggatattggtactggtctggatactgtagtgacgaaactggcagcagaagtgctgcactgcccaccgcaggacgtgcatgttatctccggtgataccgatcatgcgttgtttgataaaggcgcatatgccagctccggtacttgcttcagcggtaacgcggcgcgtttggcagcggaaaatctacgggagaaaattctgttccacggcgcgcaaatgttgggtgagccagtggcagatgttcaactggcaacgccgggcgtcgtgcgcggcaagaaaggcgaagttagtttcggggatattgcccataaaggcgaaaccggcaccggctttggtagtctggtgggaactggcagttatatcacgcctgatttcgccttcccgtatggcgcaaacttcgctgaagttgccgtcaacacgcgtacgggtgaaatccgcctggataaattctacgccttgctggactgcggtacaccggtcaatccagagttagcgttgggacaaatctacggtgccaccctgcgtgctatcggccacagtatgagcgaagagatcatttatgacgccgaaggtcacccgttaacgcgtgatttacgcagttacggcgcaccgaaaattggtgacattccgcgtgatttccgcgctgtgctggtgccgagcgacgataaagtcggcccgttcggggcgaaaagcatcagcgaaatcggtgtaaatggcgcagctccggcgattgctaccgcaattcacgatgcatgcggcatctggttacgcgaatggcatttcacaccggagaaaatactcactgcgctggaaaaaatataaataataaatggccgcttcggcggcctgtttctctgtttgaacgatgactaaatagtgactgcgaaaatgagataagccgttctcaaggcgtcctgcgccccaaattcgtgggaatttattttactaattcagatgatcaaatttactttaaaaggagtgaagggatgtctgatataaaccatgcaggttctgaccttatatttgaactggaggatcgccctccctttcatcaggctctcgttggtgccattacccatctgttggcaattttcgttccgatggtaacccccgcgttaatcgtgggtgcggccttacagctttccgctgaaacaactgcctatcttgtttctatggcgatgatcgcctctggtattggtacctggttacaagtaaaccgctacggcatcgtcggttctggcctactcagtattcagagtgtcaattttagttttgttacggtcatgattgcgctgggcagcagcatgaaaagcgacggttttcacgaagagttaatcatgagcagccttctcggcgtctccttcgttggcgcatttctggttgtcggatctagttttatcttgccctatttacgtcgggttattacgcctaccgtcagcggtattgtggtactgatgatcggcttaagcctgattaaagtcggcattatcgattttggtggaggatttgcagccaaaagcagcggtacgttcggcaattacgaacatctcggcgttggtttattggttttaattgtggtgatcggctttaactgctgtcgcagtccgttgctacgcatgggagggatcgccattgggctatgtgtcggctatatcgcaagcttatgcctgggcatggtggatttcagcagtatgcgcaatttgccgttaatcaccatcccgcatccgttcaaatacggctttagttttagcttccatcagttcctggtggttggcacgatttatctgcttagcgtgctggaagcagtcggcgatatcaccgccacggcaatggtttcccgccgccccattcagggggaagagtatcagtcccggctgaaaggcggcgtgctggcagatggtctggtttctgttatcgcctccgctgtcggtagtttaccattaaccacgtttgcgcaaaataatggggttattcagatgactggcgtcgctagtcgttatgtcgggcgaaccatcgcggtaatgctggttatcctcggcttatttccgatgattggcggcttcttcacgaccattcccagcgcagttctgggaggcgcaatgacgttgatgttttccatgattgccatcgcagggattcgcatcatcatcaccaacggtttaaagcgccgtgaaacacttattgtcgccacttctttaggtttagggcttggcgtctcctacgatcccgaaatttttaaaatattgccagcctctatttatgtattagttgaaaaccctatttgtgctggcgggttaactgcgattttattaaatattatcctccctggtggctaccgacaggaaaacgttctgcctggtattaccagtgcggaagagatggattaacagtaaaggagtcaatgatgagtggagaacacacgttaaaagcggtacgaggcagttttattgatgtcacccgtacgatcgataacccggaagagattgcctctgcgctgcggtttattgaggatggtttattactcattaaacagggaaaagtggaatggtttggcgaatgggaaaacggaaagcatcaaattcctgacaccattcgcgtgcgcgactatcgcggcaaactgatagtaccgggctttgtcgatacacatatccattatccgcaaagtgaaatggtgggggcctatggtgagcaattgctggagtggttgaataaacacaccttccctactgaacgtcgttatgaggatttagagtacgcccgcgaaatgagcgcgttcttcatcaagcagcttttacgtaacggaaccaccacggcgctggtgtttggcactgttcatccgcaatctgttgatgcgctgtttgaagccgccagtcatatcaatatgcgtatgattgccggtaaggtgatgatggaccgcaacgcaccggattatctgctcgacactgccgaaagcagctatcaccaaagcaaagaactgatcgaacgctggcacaaaaatggtcgtctgctatatgcgattacgccacgcttcgccccgaccagttctcctgaacagatggcgatggcgcaacgcctgaaagaagaatatccggatacgtgggtacatacccatctctgtgaaaacaaagatgaaattgcctgggtgaaaagcctttatcctgaccatgatggttatctggatgtttaccatcagtacggcctgaccggtaaaaactgtgtctttgctcactgcgtccatctcgaagaaaaagagtgggatcgtctcagcgaaaccaaatccagcattgctttctgtccgacctccaacctttacctcggcagcggcttattcaacttgaaaaaagcatggcagaagaaagttaaagtgggcatgggaacggatatcggtgccggaaccactttcaacatgctgcaaacgctgaacgaagcctacaaagtattgcaattacaaggctatcgcctcagcgcatatgaagcgttttacctggccacgctcggcggagcgaaatctctgggccttgacgatttgattggcaactttttacctggcaaagaggctgatttcgtggtgatggaacccaccgccactccgctacagcagctgcgctatgacaactctgtttctttagtcgacaaattgttcgtgatgatgacgttgggcgatgaccgtagcatctaccgcacctacgttgatggtcgtctggtgtacgaacgcaactaataataaaactttaacatcctcgtgaggacatcattatgtctggagacatcctacaaacaccggacgcaccaaagccacagggcgcgctggataattattttaaaattaccgctcgtggcagtaccgttcgtcaggaagtactggctggcttaacgacctttctggccatggtttattccgttatcgtcgttccgggaatgctgggcaaagcaggttttcctcccgcagctgtgtttgttgccacctgtctggtcgcgggcttcggcagcttgctgatgggattatgggctaatttgccaatggcgattggttgcgcgatttccttgacggcgtttaccgcattcagtctggtactcgggcaacaaattagcgttcctgtcgcactgggcgcggtatttctgatgggcgtcatcttcaccgccatttccgtaaccggtgtgcgtacctggatcttacgtaatttgccgatgggtatcgctcacggtacaggtatcggtatcgggctgtttctgctgctgattgctgctaacggtgtgggtatggttatcaaaaacccgattgaaggcttgccagtggcgctcggtgcgtttacctccttcccggtgatgatgagcttgctggggctggcggtcatcttcggcctggagaagtgtcgcgtacccggcgggatcttgttggtgattattgcaattagcatcatcggcttaatctttgacccagcggtgaaataccacggtctggtggcgatgccaagcctgactggcgaagatggtaagtctctgattttcagcctcgatattatgggtgcactccagccaactgtacttccgagtgtactggcattggtgatgaccgcagtgttcgacgctactggcaccatccgtgccgtcgccggtcaggcgaatttgttggataaagacaaccagatcatcaacggcggcaaagccctgaccagtgacagtgtaagtagtatattctccggcctggtgggcgcagcgcccgcagcggtttatatcgaaagtgcggcaggaaccgccgccgggggtaaaacaggtttaaccgcaaccgtagtgggggcgttattcctgttaattctgtttttaagtccgctgagttttttgatccctggttacgccactgcacccgctctgatgtacgtaggtttgctgatgttaagtaacgtcagcaagctggatttcaatgattttattgacgctatggctggcctggtgtgtgccgtgttcatcgttctgacttgtaatatcgttaccggtattatgctgggctttgtgacactggtcgtaggccgcgtctttgcacgcgaatggcaaaagctgaatattggtacggtgatcattactgccgcactggtcgcattttacgcgggtggttgggcaatctaatagattctccgcgcctttcagcgcggagatttctttcagagaggattctcaccgctggcaacaatacgctgctggcggactcgcctgagttctctttcagtaagcaactgcagcgcctgtgttgggcaagattcaacgcaggctggcccctcttcccgctgttcacagagatcgcatttcacaatttgttgtcgggtatcccccggcaagctctgaatggtgatcattccaaacgggcacgcactgacgcaactctgacagccaatacaacgggcagaattggtctgcaccacctgctcgcccatcgtcagcgcccccacggggcaagcgccaacacaaggggcgttttcacactgatggcacatcaccggcgcactgatgctgtccagtcgctgtaccttcagccggggtaaaaagacatcggcattcaactcctgttcactagggtgagcgaccacacaggctacttcacaagtacggcagccaatacagtcagccggattaacgataattaagcttttcatcagcttgccttcgtatcaaacagagttaacatatcgcgcgccgcctgccttcctgcggccattgcagtgacaaccagatccgcgccatgaactgcatcaccaccagcaaagacttttttcagatgcgtctgggtaggtaaatacccgacgtcaccggtttgaatcaggccccatttatcgagtttaattccgctgccctgcaaccacggcatggcatgcgcctggaaaccaaaggccataatcagaacatcggcgggcaattcaaactcactacccgctaccggacgaggacgacggcgaccatccggccccggctcacccatggcggtacgaatcaggcccaccgcagttaaacgcccatcttcgtcacaagcgatatattgcggttgaacattgaactgaaactcgacaccttcctcgcgcgcattaaccacctctttgcggctgcccggcatactgacttcatcacgacgatacgcgcaggtcacgctggcggcattgaggcggatggaagtccgcaaacaatccattgtcgtatcgccaccgcccaataccacgactcgcttaccttccacgtccgtcagcggatactcttcagactccggcaatcccatgagctggcgggtatgggcagtcaggaacggtagagcctgaatgacaccgggcgcatcttcatgcggcagatctgctcgcatcatcccgtaagtccccacgccgatgaaaactgcatcatattcagaagttaaatcgctaaaggtaatatcgcggccaatttcacagttaagatgaaagtcgattcccattgcggtgaatatctctcgccgctggcttaataccgttttatcgagtttgaaaggaggaatgccaaaagtcagcataccgccaatttctggatggcgatcaaagacatcgacctgaactcctgcgcgcgccagaatatcagcacaccctaaccctgcaggcccagcgccaatcaccgccactttttcgctacggggaacaactttgctgacatcgggacgccaacccatcgccagcgcggtatcggtgatgtagcgttccagattaccgatagagactgcgccgctgtgatctttcaaagtacatgcgccttcacaaagacggtcctgtggacataccctgccgcaaatttctggtaaggaactggtctggtggcaaagttctgccgcttcaataatctttccttcctgtaccagacggatgtaatccggaatagcgttatgcagcgggcaatgccagttgcagttagctttttcggcacaataaacacagcggtcactctcataagtcgcttgttgtggatccagcccgcaatatatttcgccaaagtgggttttccgttcactcgcactaattttatctgcgcctttacggctgttaacggggagcaacgctgcactgcgagatggctgagcgtcactactcgcttttcctgctgccgttttgcgctggcgggccacctttatctgctgcaaccctttatcgtccatcagtcgtaacgcctgtgttgggcaaacttcaatacaggcttgcgtgccggaactgcgctggttacaaaggtcgcatttctgcgcaatcgtatcgaccatctcaacgacgccaaaggggcaagcgattgcgcatcttttacaaccaatacatttttgctcgtccagttgtacgctatcggactggaaagtcagagcattaaccggacaagccgtaacgcaaggggcattgttgcagtgatggcaggccaccggattcgcagcctggcctttccctacaacgtggatacgcggtcgaaagtcactgtgactcagcggccagttttcttgattgtgtgccaccgcacaggcaatttcacaagcatgacagcctatacattccgcagcttcagcagcaataaacttattcatttgcatccctttcatttaatgagttatgtcttctcaaatttcgcgatgcaataaacgggcatatattaggtagcatgaccgttttaattataattttgcgactgagttcaaattattgcccctcaatctatgccgctttcattatttcaacattgccgatcaaaagagcgctatccagataaaaacgattaaatgcgagagtgcgacatgccagaatgattaatgaaatatcaatatgagaaaattacagataattccattgtcaggttctcttctcattttcgtggtttaaccacgattatgtgattgcctccgcaattcctgtctctaactccccttcctcgcaaaaactggcactccacgagcatgtgtttagacagtttcattaacgtaaacggttgctttttactctggcgggcgaaaggagaaacactgatgagcgccatagattcccaacttcccagttcttctgggcaagaccgcccaactgatgaggttgaccgcatattaagtccaggaaagctgatcatactcggtctgcaacacgtccttgtcatgtacgcaggtgcagtcgctgttcctcttatgattggtgaccgactgggcctcagtaaagaagctattgcgatgctcattagcagcgatctcttttgctgcgggatcgtcacattattgcaatgtatcggtatcggccgctttatggggatccgcctgccggtgattatgagcgtgacctttgctgctgtaacaccaatgatagccattgggatgaacccggatatcggcctgctggggatatttggtgccactatcgccgcgggttttatcaccacattattagcgccacttatcggtcgcttgatgcctttattcccgccactggttaccggtgtggttattacttctatcgggcttagcatcattcaggtgggtattgactgggccgccggaggtaaagggaatccgcaatatggtaatcccgtttatttaggtatctcctttgccgtcttaatttttatcttgctcattactcgctatgcgaaaggatttatgtccaacgtcgccgtattactggggattgtatttggctttttacttagctggatgatgaatgaagtcaatttatccgggctacatgatgctagttggtttgcgattgttacgccgatgagctttggtatgccgattttcgatcccgtttccattctgaccatgactgccgtgttaatcatcgtgtttatcgagagtatggggatgttcctggcactgggtgaaatagtcggtcgtaaactctctagccacgatattattcgcgggctgcgtgtcgatggcgtagggacaatgataggcggcacgtttaacagcttcccccacacgagtttttctcaaaacgttggcctggttagcgtgacgcgcgttcatagccgctgggtgtgtatttctagcggaattatattaatcctgtttggcatggtgccaaaaatggcggtgctggtagcctccattccgcaatttgtgctgggcggcgctggtctagtgatgttcggcatggtactggcgacagggattcgaattctgagccgctgtaactacaccaccaaccgttacaacctctatattgtggcgatcagtctcggcgttggcatgactccgacgctctctcacgatttcttttctaagttaccggccgtactgcaaccgctgctacatagcggcattatgctcgcaacccttagcgccgttgtgctgaacgtcttctttaatggctatcagcatcatgctgacctggtgaaggaatccgtctctgataaagatttaaaagtcaggacagtacgtatgtggcttctgatgcgcaagctgaagaaaaatgagcatggagaataatatgaattttttaatgcgcgctatattcagtctgttgttgctttttactctctctattcctgtcatttctgactgtgttgcaatggccattgaaagtcgcttcaaatatatgatgctacttttttaaatggtttttacctgtcggcatccgctcaaaacgggcggttgtcgataaacgctcacttggttaatcatttcactcttcaattatctataatgatgagtgatcagaattacatgtgagaaattatgcaaacggaacacgtcattttattgaatgcacagggagttcccacgggtacgctggaaaagtatgccgcacacacggcagacacccgcttacatctcgcgttctccagttggctgtttaatgccaaaggacaattattagttacccgccgcgcactgagcaaaaaagcatggcctggcgtgtggactaacagcgtttgtgggcacccacaactgggagaaagcaacgaagacgcagtgatccgccgttgccgttatgagcttggcgtggaaattacgcctcctgaatctatctatcctgactttcgctaccgcgccaccgatccgagtggcattgtggaaaatgaagtgtgtccggtatttgccgcacgcaccactagtgcgttacagatcaatgatgatgaagtgatggattatcaatggtgtgatttagcagatgtattacacggtattgatgccacgccgtgggcgttcagtccgtggatggtgatgcaggcgacaaatcgcgaagccagaaaacgattatctgcatttacccagcttaaataaaaaaaccccgacatttgccggggttgtgagcataacgtaatgcttattttaccggacgcatcgccgggaacagaataacgtcgcggatggtatggctgttggtgaacagcattaccatacggtcgataccaattcccagacctgctgtcggcggtaagccatgttccagtgcggtgacgtaatcttcatcgtagaacatcgcttcgtcgtcacctgcgtctttcgcggcaacctgatccaggaagcgttgcgcctgatcttccgcgtcattcagctcgctaaagccgttaccgatttcacgaccaccaatgaagaactcaaagcggtctgtgatttccgggttaacgtcgttacgacgcgccagcggagaaacttctgccggatattcagtaatgaaggtcggctgaatcagatgtgcttctgccacttcttcgaagatctcggtaacgatacggcccagaccccagctcttctcaacgtggatgccgatagattcagcaattgctttcgcagagtcgaagttgtccagatccgccatgtcggtttccgggcgatatttcttgatcgcttcacgcatggtcagtttttcgaacggtttaccgaagtccagcgtcacgtcgccgtaggtcacttccgtcttaccgagaatatcctgtgccagagtacggaacaggctttcggtcagctcgatcagatctttgtaatctgcgtaagccatgtagagttccatcatggtgaactctgggttatgacgtacggaaataccttcgttacggaagttacggttgatttcgaatacacgctcgaagccaccaaccaccagacgcttgaggtacagttccggcgcgatacgcaggtacatgtcgagatccagcgcgttatggtgggtgataaacggacgcgcagcggcaccgccagggatcacctgcatcatcggcgtttcaacttccataaagccgcggttcaccatgaactggcgaataccagagaggatctggctgcgcactttaaaggtgttgcgggattcatcgttggagatgagatcgagataacgctgacgatagcgcgcttcctgatcctgcaagccgtggaatttatccggcagcggacgcagtgctttggtcagcagacgcaactcggtgcagtggatagacagttcgccggttttggttttgaacagcttacctttcgcgccgaggatgtcgccgaggtcccattttttgaactgctcgttataaacgccttccgggagatcgtcacgggcaacgtacagctgaatgcgaccgccaacgtcctgcagggtaacgaaagacgctttacccataatacgacgggtcatcatgcggccagcaacggcgacttcgatgttcagcgcttccagttcttcgttctctttgccgtcgaattctgcgtgcaattggtcagaggtatgatcgcgacggaaatcgttcgggaaggcaatcccctgctcgcgcaggttcgccagcttctcacgacgcgttttcagttcattgttaagatcgactaccgcgtcagcgccctgtgcgtgttgttcagacatgttggttcctcataaccctgctttcaaacttgcttcgataaattgatccaggctgccgtccagcacggcctgcgtgttgcgggtttctaccccggtgcgcagatctttaatgcgggagtcatcaaggacataagaacgaatctggctgccccagccgatgtcggatttgttatcttccatcgcctgtttctcggcatttttcttctgcatctccagttcataaagcttcgctttcatctgcttcatggcctgatctttgttcttgtgctgggaacggtcgttctggcactgggtcacgatcccggtcgggatgtgggtaatacgcaccgcagattcggtacggttaacgtgctgaccgcccgcgccggacgtgcgataaacgtcaatgcgcagatccgccgggttgatttcgatatcaatatcatcatcaacttccggataaacaaacgcggagctgaagctcgtgtggcgacgaccgccggagtcaaacgggcttttacgcaccaggcggtgaacgccggtttctgtacgcagccagccgtaagcgtaatcgccggagattttgatcgtcacggatttaatacccgccacttcaccttcgctctcttcgatgatttcagttttgaaaccacggctttctgcccagcgcagatacatacgctcaagcatgctcgcccagtcctgtgcttccgtaccgccagaccccgcctgaatatcgaggtagcagtcggcgctgtcatattcgccagagaacatacggcggaactcaagctgcgccagtttttcttccagggcgtcgagttcagcaacggcttcgttaaaggtttcttcgtcgtcagcttctacagccagttccagcagaccagaaacatcttccagcccctgtttcatttggtcgagggtgtcgacaacggcttcgagggaggaacgctctttacccagcgcctgtgcgcgttcgggttcgttccagacatccggctgttccagctcggcgtttacttcttccagacgctctttcttggcgtcgtagtcaaagataccccctaagaacgtcggagcgttccgtgaggtcctgaatgcgattatttaccggattaatttcaaacatggtctgatttcttttattgagctagtcaaaatgcggtgataagagcgggattgtacccaatccacgctcttttttatagagaagatgacgttaaattggccagatattgtcgatgataatttgcaggctgcggttgccgcgaaactcgttgatatcgagcttataagccagttgcacttcgcgcacgccgttatccggccagagggcggtatcgacattaaaagcaataccatccagcagtggaccgccgccgaccggttcgaccatcaccttcaaatgacgttcgcccaccagccgctgttgcagcagacggaaatgaccgtcaaacagcggctccgggaacatctgcccccacgggccagcatcgcgcagcagctgcgccacttccatggtcatttcggccgggcttaacggaccgtcacttaccacttcgccttgcaataggctagggtccagccactcagtaaccagttcgccaaaccgttgttgaaagagtttgaatttatcctcttccaggctcaaacccgccgccatcgcatgaccgccaaacttcagcatcatgccagggtagagtgtgtctaatcgctccagcgcatcacgcatatgcagcccctgaatggagcgaccggaacctttcagcgtaccgtcacctgctggcgcaaacgcgataaccggacggtgaaaacgctctttgatgcggctagccagaataccgacaacgccctgatgccattcggggtgatacattgccagcccgccgggtagcgtgtcacggctgcgctccagtttctcgcacagggtcagggcttcaatttgcattccttgttcgatctcttttcgcgtctggtttagcgcatcgagttcatttgccagcacgcgcgcttcgccgatgttgtcgcacaacaacagcgccacaccgacggacatatcgtccagtcgtccggcagcattgagacgtggccccagcgcaaaacctaaatcgctggcggcgagtttttgtgcatcacggtttgccacttcaagcagcgctttaatccccggacggcactttccggctcggatgcgactcatcccctgccaggtcagaatgcgattattagcgtccagcggcacgacgtccgccactgtccccagcgcgaccagatccagcagttctgccaggttaggaattgcgatgttacgctcatcaaaccagccctgatcgcgcaaaaaggtgcgcagcgccagcatcagataaaacgccacacccacgcctgccagacttttgctcgggaaattacagtcgcgcaagttagggttaatgatcgcttccgctgcgggtaatgtgtcgcctggcaaatggtgatcggtaacaataaccgggatgcccaagctgcgagcgtgctcaacccccgcatgggaggaaataccgttatccaccgtgacaattaactgcgcgccacgggcatgggcctgatcgaccacttccgggcttaagccgtaaccgtcttcgaaacggtttggtaccaggtagtcgatattgctgcaaccaaggctgcgcatcgccagcacgcttagagccgtgctggtcgcgccgtcggcgtcgaaatcaccgaccacaataatccgcgttccttcgcgaaaagcgttgtaaaggatctcaacggccttttcgacgccgctcagttgctgccagggcagcatacctttaacactgcgttccagttcttgcgcactgcgtactccccggctggcgtataaacggcgcagcaagggaggcaattcagcgggcaagtctgccgtttcatcgacttcacggcgacgaagttgtatctgttgtttcacgcgaattatttaccgctggtcattttttggtgttcgtcgaggaattctttcatctctttcggcggctggtaacccggaacaagtgtgccattgctcagcacaactgccggagtaccgctaacgccaagctggacgccaagtgcgtaatggtcggcaatatccacgtcgcaactggctggtgcgacgcttttacctgccatcacatcatcaaacgctttgtttttatctttcgcacaccagatagctttcatttctttctctgcatcgctgtccagcccctggcgcgggaaagcaagataacgcacggtgatccccagcgcgttgtagtctgccatttgctcatgcagtttgtggcagtaaccacaggtaatatcagtaaacacggtgatgacgtgtttttcctgcggcgctttataaacgatcatctctttttcaagcgcattcaactgctttaacagcatcttattggtgacattgaccggagccgtgccactaacgtcatacattggcccctgaatgatatgtttaccatcatcggtgatgtacaacacgccgctgttagtcagaactgtcttcatgccagctacaggcgcgggctgaatatcgctgcttttgatgcccattttggctaacgtttgttgaattgccgcgtcatcagcctgagcaaagccactaaacgccgctaacaaagtaaacaacataaaacctttcttcataaatcttcccgttcttttcagacatcacgcccgcgggtgatgctgttgatgaagttgccgcagacgctcggtagcgacatgcgtataaatttgcgtggtggagagatcgctgtggcccagtagcatctgcaccacgcgtaaatccgcaccatgatttaataaatgagtggcaaaagcgtgacgcaacacatgcggactcagcttttcgctgtcgatacccgccagcacagcataatgtttaatacggtgccagaaggtctgtcgcgtcatctgctgcgcacgctggctgggaaacaacacgtcaatactcacaccattcagcagccacggacgcccatgttccagataggtttccagccagtaaaccgcctcttcacctaacggcaccagacgctctttgttgcctttaccaatgacccgtaccacgccctgacgcaggctgatatcactcattgtcagtccgaccagttcagagacacgcagcccggtagcatacaacacttcaagcatggctttatcgcgtagctccagtggctgatcgattaatggtgcctgtaataaacgttcgacctgcgcttcgcttaaatcttttggcaaacgctggggcaatttcggactagcgagatgcgcactgggatcgtcttcacgaaacttttcgcgataaagatactggaacaatcggcgcactgcactcagcaaacgcgcactgctggtggctttatacccgccctccagccgttctgccagtaatgcctgcaaatcgtcactttgcgccgtcgccagcgtcaacccgcggtgatgcaaccactccaccatcatactcagatcgcgacggtaagcgttcaacgtattttcagccagatttttttccagccacagagcatcaagaaactgctcgatgcgtgccagatcctgtttcacttgcgccccttatggtcactcatttgatccattatgccttattgtgccgtgactaaagcgattctgatacactagccgcaaaagccacagcagaatcgagaagcttacgttatgaatatgggtcttttttacggttccagcacctgttacaccgaaatggcggcagaaaaaatccgcgatattatcggcccagaactggtgaccttacataacctcaaggacgactccccgaaattaatggagcagtacgatgtgctcattctgggtatcccgacctgggattttggtgaaatccaggaagactgggaagccgtctgggatcagctcgacgacctgaaccttgaaggtaaaattgttgcgctgtatgggcttggcgatcaactgggatacggcgagtggttcctcgatgcgctcggtatgctgcatgacaaactcagcaccaaaggcgtgaagttcgtcggctactggccaacggaaggatatgaatttaccagcccgaaaccggtgattgctgacgggcaactgttcgtgggtctggcgctggatgaaactaaccagtatgaccttagcgacgagcgtattcagagctggtgcgagcaaatcctcaacgaaatggcagagcattacgcctgatctcactgacggcttagcgcatatgctttgccgtcatctttatctttgcgtctcttgttgcaacaaaatccgccgtaaatcccgccattcagcttcgtccatgctgtcggctgccagccataaatgttgccgtttaccgccatcagaacgtaaacgcagcatcatgccgctcttaatcatccacggtgctttgacgatgctccactcctgcccttgccaacgcaaacgcccgtccatcaacaagcgaatttccccctggcgagcattaatacgccgctggctgcgaacgcaatcaaacaccaccaggctaagtaacaccatccataacggggtgtaactgagtggccagggcatgagtaaaataacagcggcaaccagcccatgaatcagcaaggaaagccactgtgcgcgccaggagacgcgcaaatcagattgccacaggaccacgttcccggttccgtgtctggatgagtcggaccatcatttccagttctgcatcggccggtttaccgtgattcatcagccagttaaacaggtccggatcgtcacattccagcagacgaataaagatgcgtttttcgtcatcgcttaagctgtcgtactcatgttcgaaaaacggcatgatactaatatcgagttcgcgcataccacggcggcatgcccaatgaatgcgggctttgttgttaatgtccatcttcttcctgtctcacgaaaatccagtacccggctattgtaacgtgtttttcgccttcttttacgggaatatcagtaaacaccatcgcgatcgcgaaattaattcacaacaattcaatggcttcatttttttggaagtcgcctcgcagaaggcacagatcgcgtagtgaaagcacttgcattgcctcatagctcttttaccattagtcattaatacgccgttaagcaactcaggactctattatggcttttacaccttttcctccccgtcagcctacggcttctgcccgtttaccgctgacgctgatgacgcttgatgactgggcgcttgccaccattactggcgcggacagcgaaaaatatatgcagggtcaggtgacagcagatgtcagccagatggcagaagatcagcacctgctcgccgcccattgcgacgccaaaggtaaaatgtggagcaatttacgtctgttccgcgacggcgatggctttgcatggattgaacggcgcagcgtgcgtgaaccgcagctgactgaactgaaaaaatatgcggtattctctaaagtgaccatcgcgccagacgacgagcgtgtgctgcttggtgttgccggttttcaggcgcgcgccgcgctggcaaatctctttagcgaactgcctagcaaagaaaaacaggtagtcaaagaaggcgcgaccactttgctatggtttgaacacccggcagaacgtttcctgatcgtaaccgatgaagctactgctaatatgctgaccgataaactgcgcggtgaagcggaactgaacaatagccaacagtggctggcattaaacattgaagcgggtttcccggtgattgatgccgccaacagcgggcagtttatcccacaggcgaccaatctccaggcgctgggcggtatcagctttaagaaaggctgttataccggacaagagatggtggcgcgagcaaaattccgtggtgccaataaacgtgcgctctggttgctggcaggtagcgccagccgactgccggaagctggtgaagacttagagctgaaaatgggcgagaactggcgtcgtaccggtacggtactggctgcggtaaaactggaagatggtcaggtcgtggtacaggtcgtcatgaataacgatatggaaccggatagcatcttccgcgtacgcgacgatgcgaatacattgcatatcgagccgctgccgtatagcctcgaagagtaaatctctttatcgcatcaggcatttatcgcctgatgcgacgctggcgcgtcttatcatgtctgggatttgatgcctttatcacaacagggacgaggcccgtagatcggataaggcgttcacgccgaatccggcagttgtgctccgatgcctgatgcgacgctggcgcgtcttatcaggcctacaaaggcatacccattacgcctgcccaatatacaaatagatcgccagaaagtggcacacactaccgccgagcacgaagccgtgccagatggcatggttgtatggaatgcgtttgcagacgtagaaaatcaccccgaggctataaaccacgccgcctaccgccagtaaggtaacgctgcccgccgcgagcttaactgccatttcataaattaccaccaggctcagccagcccatcgccagataggtcaccagagataaaattttgaatcggtgcgcgatggtcagtttaaacagaatacccagcaatgccaggctccagataacaatcatcaacccgcgcgctaacggagaatccagccccaccagcaaaaacggcgtgtaggttccggcaatcaacaggtaaatagcgcaatggtcaaatttcttcagccacatttttgcccgttgatgaggaatggcgtgatagagcgtgctagcgaggaacagcaggatcatactgccgccatagaggctgtagctggttatcgctgtggcgctggcattaagatccaccgcctgaaccagtagcaacaccagcccaacgataccaaacaccaacccaatgccgtgactgacgctgttggctatttcctctgccagactatatccctgcttaatgaggggcttctgaaccataacttactccggagaaacgtacacgcacatgtatacctctccagcgtaactgagaatagttccagtgaacacctgttagctaaaataaattctgatttgagactaatctcctaaaaatcatgaaattaaatgcgaaatttcaactaacaggcgtgagttcaatttaaagacatttaaattcaatcacataaaattgtgtctgaccgggatagatgtcagcaatgacttttttcagttcagtcagggtcatattttcctgctctgcatgtttttcagtcagcgtatccagcgttacggtactggttgcggtgacttcaatcgtgcaaaaataaccgtcatcttcaaaacgtccgacacgaagcacatcacccgttttgaagtggctttcagactcgtcgcggatggtgatggttttacgcccagccagaatgtcatcctggaaacgttgaaaaaaagtgatgtcgtttggctgcatggtactatttcctgtaagaattgactcatctggagcctatgatagtgaaaaaactcaccttaccgaaagatttcttatggggcggcgcagttgccgctcatcaggtcgaaggcggctggaacaaaggcggaaaagggccgagcatttgtgacgttctgaccggtggcgcacacggcgtgccgcgcgaaatcaccaaagaagtcttgccaggaaaatactatccaaaccatgaagccgttgatttttatggtcactataaggaagacatcaagctatttgccgaaatgggcttcaaatgttttcgtacatccattgcctggacgcgcatttttccaaaaggcgatgaagctcagccaaacgaagaagggctgaagttctacgatgatatgttcgatgaactgctgaaatacaacatcgaaccggtgatcaccctctcccactttgaaatgccgctgcatctggtgcagcaatacggtagctggaccaaccgtaaagtggttgatttctttgtacgtttcgcggaagtggtatttgaacgctataagcacaaagtcaaatactggatgaccttcaacgaaattaacaaccagcgtaactggcgtgcaccgctgttcggttactgctgctccggcgtggtgtataccgagcatgaaaacccggaagagacgatgtatcaggtgctgcatcaccagtttgtcgccagcgccctggcggtgaaagctgcgcgtcgcattaacccggagatgaaagtcggctgtatgctggcgatggtgccgctctatccttactcctgtaacccggacgatgtgatgttcgctcaggagagcatgcgcgaacgctacgtctttaccgatgtgcagctacgcggctattacccgtcctatgtgttgaacgagtgggagcgtcgcggatttaacatcaaaatggaagacggcgatctggatgtgctgcgtgaaggcacctgcgattatcttggtttcagctattacatgaccaatgcagtgaaggccgaaggcggcaccggcgatgcgatctctggttttgaaggcagcgtaccaaacccgtatgttaaagcatctgactggggctggcagattgatccagtaggtctgcgctatgcactttgcgaactgtatgagcgttatcagaggccgctgtttattgtcgaaaacggttttggcgcttacgacaaagtggaagaagatggcagcatcaacgacgactaccgcattgactacctgcgcgcccatatcgaagagatgaaaaaagcggtgacttacgatggcgtggatctgatgggctacacaccgtggggctgcatcgactgcgtgagcttcaccaccgggcagtacagcaaacgctacggctttatctatgtgaataaacatgacgacggtactggcgatatgagccgtagtcgtaagaagagctttaactggtacaaagaggtgattgccagcaacggcgagaagctttaagtcgatgaagtaccggatgcaatacttgttgcatccggtcagacaacttccctgttttatttcccgcccgccaaatcgataaaacttcccgtgacgtaagaggctttatcacttagtagccagacaatggcctgcgcgacctcttctgcctgtccaccacgctgcatggggatgttgctcttaacgcgatcgacgcgtccaggctcgccgccgctggcgtgcatttcggtataaataaaccctggccgcacgcagttaacgcggatcccctgcgcggcgacttccaggcttagtccggtggttaacgtatcaatcgcccctttgcttgccgcgtaatcaacatattcccctgggctacccaaccgactggccacgctagagacattgacgatagcgccgccactgccaccatttttaagcgccatgcgttttaccgcctcgcggcagcagagaaaatatcccgtcacgttggtggaaagtactcggttgattcgctctgcggtaaggttttcaacggtgcactgggtaaacaagatcccggcgttattgaccagcgctgctagcggttcatcgtgctgatcgattgctgtaaacatcgcaacgacctggttttcgtcgctgatatccgcctggagcacgaatgctttgccaccggcttgcgttattaagttcatcacttcctgcgccgcgtggaggttttgctgataattaaccgccaccgtatacccttcttgcgccaacagtaatgcagttgcccgcccgatgccgcgactgccaccagtcacaagtgctatagccatttgtttttccgagaaaaattaattcgttgacgtatctttgagattgctaacaaactggctcaatcttcaatgttggcacgcttttccccctcgccctttcagggagagggccggggtgagggtaaatattcgcgccagtgccggcctgttcccctcaccctaaccctctccccaaaggggcgaggggactgtctgagcacttttgtactttgtcatctgactaaaaaggcgccgaagcgcctttagaaaatagtcgaatcagtgaattactggtattcgctaatcggtacgcaggagcagaacaggttacggtcgccgtaaacatcatccagacgtttcactgtcggccagtatttgtctgccacacctgccgggaataccgcaacttcacggctgtacggatgcgcccactcggcgaccagttcgctctgaatgtgcggcgcgttcaccagcgggttatcttccagcggccagacaccggctttcacctggtcaatttctgcgcggatagccagcatcgcgtcgataaagcgatccagttccactttgctttcagattcagtcggttcaaccatcagcgtacccgccaccgggaagctcatcgtcggcgcgtggaaaccgtagtcgatcaggcgcttggcaatatccagctcgctgatgccggtttcttctttcagcgggcgaatatcgagaatacattcgtgcgccacgcgaccgtcgcgaccggtatacagcaccgggaaggcatcctgcaggcggctggcaatatagttggcgttgaggattgccacctggcttgcttttttcagcccttctgcgcccatcatgcggatgtacatccagctgattggcaggatagaggcgctaccgaacggtgccgcagaaaccgcgccctgacgggttaacatgccttcgatttgcaccacgctatgacccggtacaaacggtgccaaatgcgctttcacgccgatcggtcccatacccggaccaccaccgccgtgcggaatgcagaaagttttatgtaggttaaggtgactaacgtccgcaccaataaagcccgggctggtgatgccaacctgggcgttcatgttcgcgccatcaaggtaaacctgaccgccgaactgatgcacgacttcacacacttcacggatcgtttcttcatacacgccgtgggtagaaggataagtcaccatgatacaggagaggttatcgcccgcctgttccgctttcgcgcgcagatcagtcagatcgatgttgccgtttttatcacacgccacaaccaccacctgcattcctgccatatgtgcagaagcggggttagttccgtgcgcagaagccgggatcaggcagatatcgcgatgcccttcgttgcggctttcatgataatgacgaatcgccagcaggcccgcgtattcgccctgtgcgccagagttcggctgcatacaaacggcgtcgtaaccggtcagtttcaccagccagtcagccagctgcgcaatcatctgctgataaccttcggcctgctccggcgggcagaacgggtgcagttcggcaaattccggccaggtgattgggatcatctcggcggcggcgttcagtttcatggtgcaggaacccagcgggatcatcgcctgattcagcgccagatctttacgctccaggctgtgcatatagcgcatcatttcggtttcgctgtggtagcgattaaacaccggatgggtgaggatttcgtcgtcgcgcagcatcgcaggctggatagagcggctgtcgtgagccacgtctttgtccagcgtgtcgatgtccaggccgtggttatcgcccagcagcacgttgaaaagctgcattacgttttcacgcgtggttgtttcatcaagggtgatcccaaccgcgttcagaatatcgctacgcaggttgatttcagccgcttcggcacgcgtcagtacgcccgctttgtcggccacttccacacacaaggtgtcgaaatagtgcgcatggcgcagtttcagacctttttgttgcaggcccgccgccaggatatcggtcagacggtgaatgcggttagcgatacgtttcaggccaaccgggccgtgataaacggcatacaggctggcgatgtttgccagcagtacctgggaagtacaaatgttggagttcgctttctcacggcggatatgttgctcgcgagtctgcatcgccatgcgcagcgcggtattgccagctgcatctttgcttacaccgataatacggcccggcatactgcgtttgtattcatctttcgccgcaaagaatgccgcgtgtgggccaccgtagcccatcggcacgccgaagcgttgcgcgctaccaaaaacaatatccgcgccctgtttacccggcgcagttaacagcaccagcgccataatatcggcggcaacgctgaccacaattttgcgacttttcagttcgctaataagcgcagtgtagtcgtgaatttcaccggtagtgcctacctgctgtaacagcacgccgaagacgtcctgatggtcgagcactttttgcgcgtcatcgacaatcacttcaaaaccaaaggtttcggcacgagtacggaccacatccagcgtttgcggatgcacatcggaagccacgaagaagcggttggcatttttcagtttgctgacgcgtttcgccatcgccattgcttcggcggcagcggtggcctcgtccagaagagaagcagaggccatatccagtccagtcaaatccagcgttacctgctggaagttgagcagtgcttcaaggcggccctgggagacttcaggttgatacggagtgtacgcggtataccagcccggattttccagcatgttacgcaggataaccggcggtagctgcacggcggtgtaacccatgccgatgtaagacgtgaagcgtttattgcgactggcaatagccttgagttctgccagtgcggcgtattcggtcgccggtgcgccaacctgcggtggtgtcgcaagttgaatatctttcggcacaatctggccggtcagcgcgtttaagctttgtgcaccaacggcattcagcatttcttgctgttgcgcggcgtccggtccgatatggcgttcaataaaagcgccgctgttttcaagctggcttaacgtctgtgtcatgagcgatggttcctgaaacgtgcagtgaattgtgaacctctctccttacgaagagagtgagggtgaggcataaattttcctcaccctgatcctctcccgcagaagaggaataaagccgttactcgtcttctaacaatgcttcgtatgcggtcgcatccagcagactttccagttcgctttcatcgctggctttgattttaaagatccagccgcctgcatacggttcgctgttcaccagttccggggaatcgctcagtgcgtcgtttaccgccacgatttcaccgcttactggcgcataaatgtcactcgccgcttttacgctttcggcaaccgcgcagtcatcgcccgcgctaaccgttgcgcccacttccggcaggtcaacaaacaccatatcgcctaacagctcctgagcatgttcggtaataccaacggtgtaagtgccgtcggcttctttacgcagccattcgtgttctttgctgtatttcagttctgctggtacgttgctcatcaatcaatctccaaaaaagtaaatcacgcgacggctttgccgttacgcacaaaaacaggttttgtcactttaaccggcatttcacggttgcgaatttgcacaatcgccgtttcgccaataccttccggcacgcgcgccagcgcaatgctgtaacccagcgtcggggagaaagtaccgctggtgataatgccttcatgctggttgccctgcgcatcggtaaagcgtaccggcagttcattacgcagcacgcctttttcggtcatcaccagaccaaccagtttttctgtaccatgctcacgctgcacttccagggcttcacgaccgataaagtcacgatctgccggttcccaggcgatggtccagcccatgttggcggctaaaggagagatggtttcgtccatctcctgaccataaagattcatgcccgcttccagacgcagcgtgtcacgcgcgcccaagccacatggcttaacacccgcttccaccagcgcacgccagaaatcggccgctttttcattgggcagcgcaatttcatagcccgcttcaccggtataaccagtggtggcaataaacagatcgcccgcctgcacgccaaagaacggtttcatcccttccaccgcctgacgctgggcgtcattaaacagtgtggcagcttttgcctgcgcattcggcccttgcacggcaatcatggaaaggtcatcacgaacggtaatttcgatgccgaaaggttcagcgtgttgggtaatccaggagaggtctttttcgcgggtggcggagttaacaacgaggcggaagaaatcttcagtaaagtagtagacgatgaggtcatctatcacaccgccagaggcattcaacatcccgctgtaaagggctttgccgcttttggtgagcttcgccacatcgttcgccagcagataacgcagaaactcccgggtgcggctgccgcgaagatcgacgatggtcatatgactcacatcaaacattccggcatcggtacgtaccgcatgatgttcgtcgatttggctaccgtaatgcagcggcatcatccagccgtggaaatccaccatgcgagcgccgcaaagcgtgtgttgttcgtacaaaggagtctgttgtgccatcttgtcctcattgaataagcggggctgacaactttttcatggtgaaattatcaccacgaaacccagcatcggagccactcccggtccccaacgcaatcgttctcttttgcctgaacttaccaccgaaacagactgttaaccataaggtaaaattgatcatcacattagcttatggttaaaaaatgcaaaaatcgcgacagaataaaaaaccaaaaaatacaccagtttctatacaaagatgatgtgatgagaaagtcaatttgaataagacaatattaagagctaaaaaaatgtcaaaaaacactaaatcaaaaaataatggcattagaaaatataatgcgaaaacggaggtgaaattagtttatttcaaatgaggaaaatctcccggcgaaaaaaccgggagatgaaagtgtgatgggtatcaaataaacaacagaggagaaatttttaacgcagccattcaggcaaatcgtttaatcccattgcctggcggataagttgcggcttaacgccaggaagcgtgtcggccagtttcaaaccaatatcacgcagcagttttttcgccggattggtaccggaaaacagatcgcggaatccctgcataccagccagcatcaacgccgcactgtgcttgcggctacgctcatagcgacgcagataaatgtactgcccgatgtctttcccctgacgatgcaaccgtttcagttcggcaatcagctctgcagcatccataaagccgagatttaccccctgccccgccagcgggtgaatggtatgtgcggcgtcgcccaccagcgccagacggtggctggcaaactggcgcgcataacgccccgtcagtgggaacacctgacgcgcgctctcaaccttgcataagcccaggcgattatcaaaagcgatatttaacgcgcgattaaattcgtcttcacttgcctgctgcatccgctgcgcttcctctgggctcagactccagacaatgctgcaaagatgcggatcgctaagcggtaaaaaggccagaatgccttcgccatggaaaacctgccgcgccaccgcatcatgcggttcttccgtgcgaatggtcgctaccagcgcgtgatgctgataatcccagaaagtcagcggaatatcggctttgttgcgcaaccaggaattagcgccgtccgcgccaatcaccagacgcgccgttaacatgctgccatctttcagcgtcaggaaggtttcattttctccccaggcgacctgctgtaattctgcgggggctaacagagtgatatcactgctctgatgcgctttgttccacagcgcgtagtgaatcacactattttcaacgatatgcccaagatggctatagcccatgctttgatcgtcaaagctaatgtgaccaaagctgtctttgtcccacacttccataccgtgataacagctggccctacgagagagaatgtcctgccagacgccaagacgggtgagtaatttttcgctggcggcattgatagcgctaacgcgcagttgtggtggtgcattcgccgccagaggttcctgtacgcgctgctccagtacggcaacgcgtaagccgctcccctgtaagccacaggcaaccgccagccccaccatgccgccgccaacaatggctacatcaacactttgcattgtttattccttaaaaccgccttcaacgcgccacccaaccgagggtgcgctgcgccagcacatcgcgtgccggggtgaataattccatcgtcatcagcccgatgttgcgcccgacaaccagcggtgcccaacggttggcaaaaagatgtacaaggctgtccgtgacgccaatggttgcttcgcgatcgctctgtcgacgctgctgataacggcacaatacgccgtaatcccccatgtcttctccgcgctcctgcgcctgagtcagggtttccgcaagactcatcacatctcgcataccgaggttaaacccttgcccggcaatcgggtgcagagtttgcgccgcattgcccaccagcacggtacgatgggtaatagatctggcggcgtgggttaacgccagcggataagcactgcgtttaccagcgtgggtaattttcccaagtcgccagccaaaggcgctctggagttcacggcaaaacttctcgtcactccagctcaacacctcttcgcgccgttccagtggatgacaccagaccaggctacagcgtccgtcagacatcggcaacatcgccagcgggccatgttgcgtaaagcgttcaaaagcgcgcccttcatgcgcaacggaagtagcaacgttggcaatcacggccagttgttcgtaaggctcctgctgccagtcaacgccgcacgcggtggctaacgcactatgggtgccatcagctgctaccagcacgcggcccgtcagcgtctcgccactctccagcgtcacttcaacgtgactctgagtacgggcaacgttagccacgcgatcagggcaatgcagcgttacgccaggtgctttacgcagcaatgcaaacagccgttgcccgacattgtgcaattcgacaacctgtcccagcgccgccagttggtaatcttctgcggcgagggtgacaaatccagcgtgaccacgatcgctgacatgcacggtggtgatggcagttgcgcaatccgccagagattgccagacgccgatgcgcgccagttgctgacaggtacccgccgccagcgctatcgctcgtccatcaaagcccggatgagcatgactctctggcgcagtcgcttcaatcaaatgtaccggcagcgccccgtgacttaaccgggaaatagccagcgccagcgtcgcgcccgccatgccgccaccgacgatgattacgctcattgctttctcgcagcaaccatcaacgcttcgatttcttccggctttttcaccacgctggcggtgaggttttcgttaccggtttcggtaatcacaatgtcgtcttcaatacgaatgccgataccgcgatattgttctggcacttctgcatccggcgcaatatacagccctggctctacggtcagtaccatgcccggttccagaatgcggctgcgatcctgaccataaacacccacgtcatggacatccagtcctaaccagtggctaaggccatgcataaagaaaggacgatgggcgttctgagcgatcagttcatcaacatcacctttcaggatgccgagttttaccaggccgctaaccatgatgcgcaccacttcaccagtgacttccagaatggaagttcccggacgatacaggcgcaggctggtttcgagagactccagcacaatgtcgtagatttcacgctgggcctgggtgaatttgccgttgaccgggaaggtgcgggtaatatcgccagcgtaacctttgtattcacaacccgcgtcaatcaacaccaggtcgccgtcgcgcatttcacactcgttttcggtgtagtgcagaatgcagccgttttcaccgctgccgacaatggtgttataggacggatagcgcgcaccgtggcggttaaattcgtggtgaatttcgccttccagatggtactcgaacattcccggacggcatttttccatcgcccgtgtatgtgccatggcggtgatttctcccgcgcggcggagtacggcaatctcttctgggcttttgaacaggcgcatttcatgaacaacaggacgccagtcgatcatcgttgccggtgcggtgagattttgccggctacctttacgcagtttttccagcgcactgttcacgattacatcagcatatgcatattcgccctgggcatggtaaaccacatccaggccgttaagtagttgataaagttgctgattgatttcgctgaatgccagtgcgcggtcaacgcccagtttctctggcgcggcatcctggcctaagcgacggccaaaccagatctccgccgtcaggtcgcgaacgcggttaaacagaacgctgtggttatgagtgtcatcgcttttaatcagcaccagcaccgcttccggttcgttaaagccggtgaagtaccagaagtcactgttctgacgataggggtattcgctgtcggcgctacgtgttacttctggtgcagcaaaaatcagcgcggcgctgccgggttgcatttgctccaccagggcctgacggcgacgctgaaactcttgccgggatatctcactcataacactctccttacgttttttgtttttagtgtagagtcggtttttgtacttctggcgcggtcggttgcggatgagtaaaggtgtcgtggcataacagcgcggcaacacgaacgtattcgatgatctcttcaaggctcatttcaagctcttcctgatcttcgtcttcgtcgtaacccagttgcgcaatgttacgcagatcgtcgatagcttcaccggtttcgccggtcactttatccagcttcggttgcgtaacgccaagaccaagcaggaagtgattgacccaacctgccaatgcatcagcccgatcgaaaacgctgacatcatcgccatcaggcagataaagctgaaaaaggaagccgtcatcctgcagggcatcgctggtggcagagtgcattttacgcagtgcctgtgccagctcatgaccgaaagccatgccttcgttcgtcaggtcgtgaagtagcggtagccaactgctgtcatcgttaccgccacatatcatcccgctgattaaaccatgcatctcagctggggtcagacccgtcccttgttggttcagatactggttcatttcgttgtaaccaggcatttcgttctgtatagacataagcattcgtcgtcaaagggaggaatattcatgatatgctaccactttgggccctggtggaccagaaaagggcttgtctcttctcatcagggtagctatagtgtcgccccttcgcagaccatgggtctaaagacgaaggcagcgcagtcaatcagcaggaaggtggcatgtctgcacaacccgtcgatatccaaatttttggccgtagtctgcgtgtgaactgcccgcctgaccaaagggatgcgttgaatcaggcagcggacgatctgaaccaacggttgcaagatctgaaagaacgcactagagtcacaaatactgaacagttggtcttcattgccgcattgaatatcagctatgagttagcgcaagaaaaagcaaagactcgtgactacgcggcaagtatggaacagcgtattcggatgctgcagcagaccatagaacaagcgttacttgaacaaggtcgcatcaccgaaaaaactaaccaaaactttgaatgacacttttcggtttactgtggtagagtaaccgtgaagacaaaatttctctgagatgttcgcaagcgggccagtcccctgagccgatatttcataccacaagaatgtggcgctccgcggttggtgagcatgctcggtccgtccgagaagccttaaaactgcgacgacacattcaccttgaaccaagggttcaagggttacagcctgcggcggcatctcggagattcccttcttatctggcaccagccatgacgcaactaccagaactcccactgacattatcccgacaagaaatccgcaaaatgattcggcaacgtcgtcgtgcgttaacgccggaacaacagcaggaaatgggtcaacaagccgctacccggatgatgacttatcccccggtggtgatggcacatacggtcgctgtattcctctcttttgatggcgaactcgacacccagccactcatagaacaactctggcgcgccggtaagcgcgtatatcttccagttttgcatccctttagtgccggtaatttgctgttcctgaattaccatccgcaaagcgaactggtgatgaacaggttgaagatccatgagccaaaattggatgtgcgtgacgtgctacccctttcccgattagacgtgctgatcacaccgctggtcgcctttgatgagtacggtcagcgcctgggaatgggcggtggtttttatgatcggaccttacaaaactggcagcactataaaacgcaaccggtgggttatgcgcatgattgtcagttggtggaaaaactccccgttgaagagtgggatatccctcttcctgcggtggttacaccgagcaaagtctgggagtggtaagggcgatacacccgcatcgccctgattgacatcgttgattctttgacctaatttagtgagtaagggtaagggaggattgctcctcccctgagactgactgttaataagcgctgaaacttatgagtaacagtacaatcagtatgatgacaagtcgcatcataacccttctccttcaagccctcgcttcggtgagggctttaccgttacagccccatgctgccctgccatcgtaaatccccattaaataaacacaacgcattgatctgactttgatttattttctggagcagactcgcaaagtagaatgcgcaacgcggcaacggtgtggagaagggataaaaaaacgggcaagtcagtgacctgcccgttgattttcagagaaggggaattagtacagcagacgggcgcgaatggtacccggaatagctttcattgcctgcagcgctttttcggcaacgtcttcgtcggcttcaatatcaataaccacataacccatctgggcggaagtttgcagatattgcgcggcgatgttgacgccctgctcggcgaagattttgttcagcgcagttagcacgcccggacggttttcgtggatgtgcatcagacgacgcccaccgtgcagtggcaggctgacttccgggaagttcaccgcagagagcgtactgccattgtcagaatacttgatcaatttacccgcaacttccaggccgatattctcctgcgcttcctgagtgctaccgccaatgtgtggcgtcagaaggacgttgtcgaattcacacagcggagaggtaaatggatcgctattggtcgccggttccgtcgggaatacgtcgattgccgcccccgccagatgtttgctcgccagcgcatcacacagcgccggaatatccaccacagtaccgcggctagcattaatcagcaggctgccgggcttcattagactaatttctttcgcgcccatcatatttttggtggacggattctctggtacatgcagactcaccacatcgctcatattcagcaggtcagaaagatgctgtacctgagtggcgttgcccagcggcagtttattttcaatatcataaaagtaaacatacattcccaggctttcagccagaatgcccaattgcgtaccaatatgaccgtagccgatgatacccagctttttgccgcgcgcttcaaaagaacccgccgccagtttgttccacacgccacggtgcgctttagcattggcttccggcacgccgcgcaatagcagcagcagttcgccaatcaccagctccgcaacagagcgcgtattactgaacggtgcgttaaataccgggatcccgcgctttgccgccgcatccagatcaacctggtttgttccgatacagaaacagccaatagcgaccagtttttctgcggcgttgatcacgtcttcagtcagatgggtacgggatcgcaggccgatgaagtgggcatcgcggatggattcttttaattgttcatcatccagcgcgcctttgtgaaattcgatgttggtgtaaccagctgcacgaaggctttccagcgccttttggtgcacgccttctaccagcagaaacttaatcttgtctttctccaggcttacctttgccatttacccaatcctgtcttttgaaatgttgtgtgcggatttgcatccgcctttcaacatatcaaaaaataatattgcggcaatatgaacgtttgcgtcgcgatgttgaggaaatatcacgcaaaggtaattcttggatgaatatgctggtttagaggatttatttagagcaatcgacaattgcctggtaaaagcgtgacacatgtcaccaaatttaatgaagagaatttttttaacgggggaggttcccccgtcagatcatttcacaatggttttgacaccgtcaggtgtgccaatcagcgcaacgtccgcgccacggttagcaaacaagccaacagtcaccacgccaggaatcgcatttatggcgttttccatcgctatcgggtcaaggatttccatgccgtggacgtcgaggatcacgttgccattatcggtcaccacgccctgacggtattccggacgaccgcccagtttcaccagctgacgcgccactgcactacgtgccatcgggataacttctactggcagcgggaatttacccagaatatcaacctgcttggaagcgtctgcaatacagataaatttttctgcaacgctagcaatgattttttcacgggtcagcgccgcgccgccgcctttgatcatttgcatgtggccgttgatttcatctgcgccatcaacgtagatgccaaggctgtcgacttcgttgagatcaaaaacgtgaatgccgaggcttttcagtttttcagtggaagcatcactactggaaacggccccttcaatctggcctttcattgtaccgagcgcgtcaataaagtgtgcggcggtggaacctgtacctacaccaacaatggtgccgggctgaacatactgaagtgccgcccatcctactgcttttttcaattcatcctgcgtcatgatcgtttcgcctgtggtatgaaatttcacacgcattatatacaaaaaaagcgattcagaccccgttggcaagccgcgtggttaactcatccataaaatatcgcgcaatggcaggcatcccctttcgccccgcaaataaagcatacaacggtctgggtatgccgctccacggtgcaaacaggcgcaccagttcaccgttcgcaagcccctgtttacaggcaaattgaggcaataacgccacgccattcaacacaaccagggcgcgaactcgctgagcgaaatgcattagcgcaaatccctgatcttttaagctgcgcttttaaccacggatacaaatgttacccgccgacggcttcggtatatgcaacctgacacaaaattgtgtcatagtgcaggaaaaagcatttaccaggagcagacaacagcaatgaaacgcccggactacagaacattacaggcactggatgcggtgatacgtgaacgaggatttgagcgcgcggcacaaaagctgtgcattacacaaagtgccgtcagtcagcgcattaagcaactggaaaatatgttcgggcagccgctgttggtgcgtaccgtaccgccgcgcccgacggaacaagggcaaaaactgctggcactgctgcgccaggtggagttgctggaagaagagtggctgggcgatgaacaaaccggtagcactccgctgctgcttagtctggcggtcaacgccgacagtctggcgacgtggttgcttcctgcactggctcctgtgttggctgatagccctatccgcctcaacttgcaggtagaagatgaaacccgcactcaggaacgtctgcgccgcggcgaagtggtcggcgcggtgagtattcaacatcaggcgctgccgagttgtcttgtcgataagcttggtgcgctcgactatctgttcgtcagcagtaaaccctttgccgaaaaatatttccctaacggcgtaacgcgtagcgcattactgaaagcgccagtggtcgcgtttgaccatcttgacgatatgcaccaggcctttttgcagcaaaacttcgatctgcctccaggcagcgtgccctgccatatcgttaattctagtgaagcgttcgtacaacttgctcgccagggcaccacctgctgtatgatcccgcacctgcaaatcgagaaagagctggccagcggtgaactgattgacttaacgcctgggctatttcaacgacggatgctctactggcaccgctttgctcctgaaagccgcatgatgcgtaaagtcactgatgcgttactcgattatggtcacaaagtccttcgtcaggattaatccatcaaataatgcctgatagcacatatcaggcgttgtcctcacttctttttgtattccttgaatcacatcacaaaatagacaaatctcaggcggcaaaaaacgacgtctgaatgcattttttttgctggcgacaaacccacgtaaaaagctcaccgtaggcgcaaataccctcattttgattgcgttttacggagcaaataatgtctaacgtgcaggagtggcaacagcttgccaacaaggaattgagccgtcgggagaaaactgtcgacagcctggttcatcaaaccgcggaagggatcgccatcaagccgctgtataccgaagccgatctcgataatctggaggtgacaggtacccttcctggtttgccgccctacgttcgtggcccgcgtgccactatgtataccgcccaaccgtggaccatccgtcagtatgctggttttagtacagcaaaagagtccaacgctttttatcgccgtaacctggccgccgggcaaaaaggtctttccgttgcgtttgaccttgccacccaccgtggctacgactccgataacccgcgcgtggcgggcgacgtcggcaaagcgggcgtcgctatcgacaccgtggaagatatgaaagtcctgttcgaccagatcccgctggataaaatgagcgttagcatgaccatgaatggcgcagtgctaccagtactggcgttttatatcgtcgccgcagaagagcaaggtgttacacctgataaactgaccggcaccattcaaaacgatattctcaaagagtacctctgccgcaacacctatatttacccaccaaaaccgagtatgcgcattatcgccgacatcatcgcctggtgttccggcaacatgccgcgatttaataccatcagtatcagcggttaccacatgggtgaagcgggtgccaactgcgtgcagcaggtagcatttacgctcgctgatgggattgagtacatcaaagcagcaatctctgccggactgaaaattgatgacttcgctcctcgcctgagcttcttcttcggcatcggcatggatctgtttatgaacgtcgccatgttgcgtgcggcacgttatttatggagcgaagcggtcagtggatttggcgcacaggacccgaaaagtctggcgctgcgtacccactgccagaccagtggctggagcctgactgaacaggatccgtataacaacgttatccgcaccaccattgaagcgctggctgcgacgctgggcggtactcagagtctgcataccaacgcctttgacgaagcgcttggtttgcctaccgatttcagtgcacgcattgcccgcaacacccagatcatcatccaggaagaaagtgaactctgccgcaccgtcgatccactggccggatcctattacattgagagcctgaccgatcaaatcgtcaaacaagccagagctattatccaacagatcgacgaagccggtggcatggcgaaagcgatcgaagcaggtctgccaaaacgaatgatcgaagaggccagtgcgcgcgaacagagcctgatcgaccagggcaagcgtgtcatcgttggtgtcaacaagtacaaactggatcacgaagacgaaaccgatgtacttgagatcgacaacgtgatggtgcgtaacgagcaaattgctagcctggaacgcattcgcgccacccgtgatgatgccgccgtaaccgccgcgttgaacgccctgactcacgccgcacagcataacgaaaacctgctggctgccgctgttaatgccgctcgcgttcgcgccaccctgggtgaaatttccgatgcgctggaagtcgctttcgaccgttatctggtgccaagccagtgtgttaccggcgtgattgcgcaaagctatcatcagtctgagaaaagcgcctccgagttcgatgccattgttgcgcaaacggagcagttccttgccgacaatggtcgtcgcccgcgcattctgatcgctaagatgggccaggatggacacgatcgcggcgcgaaagtgatcgccagcgcctattccgatctcggtttcgacgtagatttaagcccgatgttctctacacctgaagagatcgcccgcctggccgtagaaaacgacgttcacgtagtgggcgcatccagtctggctgccggtcataaaacgctgatcccggaactggtcgaagcgctgaaaaaatggggacgcgaagatatctgcgtggtcgcgggtggcgtcattccgccgcaggattacgccttcctgcaagagcgcggcgtggcggcgatttatggtccaggtacacctatgctcgacagtgtgcgcgacgtactgaatctgataagccagcatcatgattaatgaagccacgctggcagaaagtattcgccgcttacgtcagggtgagcgtgccacactcgcccaggccatgacgctggtggaaagccgtcacccgcgtcatcaggcactaagtacgcagctgcttgatgccattatgccgtactgcggtaacaccctgcgactgggcgttaccggcacccccggcgcggggaaaagtacctttcttgaggcctttggcatgttgttgattcgagagggattaaaggtcgcggttattgcggtcgatcccagcagcccggtcactggcggtagcattctcggggataaaacccgcatgaatgacctggcgcgtgccgaagcggcgtttattcgcccggtaccatcctccggtcatctgggcggtgccagtcagcgagcgcgggaattaatgctgttatgcgaagcagcgggttatgacgtagtgattgtcgaaacggttggcgtcgggcagagcgaaacagaagtcgcccgcatggtggactgttttatcagcttgcaaattgccggtggcggcgatgatctgcagggcattaaaaaagggctgatggaagtggctgatctgatcgttatcaacaaagacgatggcgataaccataccaatgtcgccattgcccggcatatgtacgagagtgccctgcatattctgcgacgtaaatacgacgaatggcagccacgggttctgacttgtagcgcactggaaaaacgtggaatcgatgagatctggcacgccatcatcgacttcaaaaccgcgctaactgccagtggtcgtttacaacaagtgcggcaacaacaaagcgtggaatggctgcgtaagcagaccgaagaagaagtactgaatcacctgttcgcgaatgaagatttcgatcgctattaccgccagacgcttttagcggtcaaaaacaatacgctcagtccgcgcaccggcctgcggcagctcagtgaatttatccagacgcaatattttgattaaaggaatttttatgtcttatcagtatgttaacgttgtcactatcaacaaagtggcggtcattgagtttaactatggccgaaaacttaatgccttaagtaaagtctttattgatgatcttatgcaggcgttaagcgatctcaaccggccggaaattcgctgtatcattttgcgcgcaccgagtggatccaaagtcttctccgcaggtcacgatattcacgaactgccgtctggcggtcgcgatccgctctcctatgatgatccattgcgtcaaatcacccgcatgatccaaaaattcccgaaaccgatcattagcatggtggaaggtagtgtttggggtggcgcatttgaaatgatcatgagttccgatctgatcatcgccgccagtaccagtaccttcagtatgacgcctgtaaacctcggcgtcccgtataacctggtcggcattcacaacctgacccgcgacgcgggcttccacattgtcaaagagctgatttttaccgctagcccaatcaccgcccagcgcgcgctggctgtcggcatcctcaaccatgttgtggaagtggaagaactggaagatttcaccttacaaatggcgcaccacatctctgagaaagcgccgttagccattgccgttatcaaagaagagctgcgtgtactgggcgaagcacacaccatgaactccgatgaatttgaacgtattcaggggatgcgccgcgcggtgtatgacagcgaagattaccaggaagggatgaacgctttcctcgaaaaacgtaaacctaatttcgttggtcattaatccctgcgaacgaaggagtaaaaatggaaactcagtggacaaggatgaccgccaatgaagcggcagaaattatccagcataacgacatggtggcatttagcggctttaccccggcgggtagcccgaaagccctacccaccgcgattgcccgcagagctaacgaacagcatgaggccaaaaagccgtatcaaattcgccttctgacgggtgcgagtatcagcgccgccgctgacgatgtactttctgacgccgatgctgtttcctggcgtgcgccatatcaaacaagctccggtttacgtaaaaagatcaatcagggcgcggtgagtttcgttgacctgcatttgagcgaagtggcgcaaatggtcaattacggtttcttcggcgacattgatgttgccgtcattgaagcaagcgcactggcaccggatggtcgagtctggttaaccagcgggatcggtaatgcgccgacctggctgctgcgggcgaagaaagtgatcattgaactcaatcactatcacgatccgcgcgttgcagaactggcggatattgtgattcctggcgcgccaccgcggcgcaatagcgtgagcatcttccatgcaatggatcgcgtcggtacccgctatgtgcaaatcgatccgaaaaagattgtcgccgtcgtggaaaccaacttgcccgacgccggtaatatgctggataagcaaaatcccatgtgccagcagattgccgataacgtggtcacgttcttattgcaggaaatggcgcatgggcgtattccgccggaatttctgccgctgcaaagtggcgtgggcaatatcaataatgcggtaatggcgcgtctgggggaaaacccggtaattcctccgtttatgatgtatagcgaagtgctacaggaaagcgtggtgcatttactggaaaccggcaaaatcagcggggccagcgcctccagcctgacaatcagcgccgattccctgcgcaagatttacgacaatatggattactttgccagccgcattgtgttgcgtccgcaggagatttccaataacccggaaatcatccgtcgtctgggcgtcatcgctctgaacgtcggcctggagtttgatatttacgggcatgccaacagtacacacgtagccggggtcgatctgatgaacggcatcggcggcagcggtgattttgaacgcaacgcgtatctgagcatctttatggccccgagcattgctaaagaaggcaagatcagtaccgtcgtgccaatgtgcagccatgttgatcacagcgaacacagcgtcaaagtgatcatcaccgaacaagggatcgccgatctgcgcggtctttccccgcttcaacgcgcccgcactatcattgataattgtgcacatcctatgtatcgggattatctgcatcgctatctggaaaatgcgcctggcggacatattcaccacgatcttagccacgtcttcgacttacaccgtaatttaattgcaaccggcagcatgctgggttaatgactcgtcccgtcacgatcttcagcaatatgctgaagcatcgtggcggtataacgatgatttctgatactataaagatattcctgcatatacatcggcctgtgcggtgcatcaaaatatttcagcgttgccggattcaccagtcgccaggcaaaatgcgggatcaccgtcagaaaatgtccgcgctccacggcgctgattttggccataaaactgtagggacgataaataatggttggattgatcccacaaggtcgcatattcgcatcaatcattgcttcgaagttggcccggttctgaaagcgcatttgtagccagggcagctcctgaagcagctcttgctcttgtcgctcttcataacggcgagaaacgagaaagcctaatcgcagcggtggtagttcactgatagtcaggttttccagttcctgaactcgtgcagatacatgctgtggggagataataaaatctaactggcggtcaaaaagattatcgataacgccattttcgctgaactcaactggctgggcggtcacgccttcatacttatctccgagactaatcaactgatcgaaaataattgtcggataagtattatctatgccaatcacaatttctcgactacgacgcccactgttatggatttcattatcaatcgcagaaagccgttgataaaccgggaacagtttttgatacagttcctgtccggctttattgaggctgatattattatctttgcgggtaaatagcgtatagccaatttgttcttccagcgcggcaatgcttttaccaaatgggctagccgtcatatggattttttctgccgcccgggcaatattattggtttgcgctaataaaatgaaattgcgcatctttttgctaataaaaatgtccatccccctcccccgcatccttgtccgcttaaccgtttcagtcagcctatccttgatgaaaccgcgagcaaagataggtgattacgtcatggttttacagaaaattacagaaaaaggaggcaatatcgggtaaaggcattagcccgacgaatacgtcgggctacaaatattattgtgctgcaggtgttttagcgggttgttgatccacaggttctaactggaagaccacatcgacctgatcatcaaactgaatagcggcctgctcgtaagtttcctgggcggacaccggcgcggcatcggctttcatcatccgcaccattgggctgggctgatagttggaaacatggtagcgcacgctatataccggccccagtttacgatgaaagccgttcgccagttcctgcgcctgatgaatcgcgttatcaatcgctgccttacgcgctttgtctttataggcatccggctgcgccacgcccaggctcacagaacgaatttcgttaagacccgccttcagcgcgccatccagcaaggaattcagtttgtctaactgacggagcgtgacttccaccgttctcacagcgcggtagcctttaaggatacttttaccatcctgataatcataatctggctgggtgcgtaagttcgcactgctgatatcttttttcgcgatctgattgagttcaaggaaggaaatgtattgtgcgacgcgctcatctgcctgtttcttggcagtagcggcatccttcgcggccacgttaacttcaatcgcaagagtggcaatgtctggcaccgcatccacgcttgccgtaccggaggtgacaatatgcggtccatccggcaattcgttagcctgcgctgccatcccgctaatacccattaatgccgccagggcgataactttgaacttcacgttagtctctccgtgttaattgacttgcccaaaattcaggacctctggaggcaagcttagcgcctctgttttatttttccatcagatagcgcttaactgaacaaggcttgtgcatgagcaataccgtctctcgccagctgcaaggcaataaaccacataacacatcccacaaccagattgataatgcgctgtgcttttgccgtgcgcagacgcggtgccagccaggctgcgagaagagccagaccaaagaaccacaggaaagaggcgctaattgtcccgagtgcaaaccagcgttttggttccacatcaagttgcccgccaaggctgcccagtacaacaaaagtatccaggtaaacatgcggattcagccaggtcactgccaacatggtggcgataattttccatctgccttgcttcatgacttcggcgctggctaactcaatattactgctcattgctgttttaaaagcgccaaaaccataccacagcaagaaggctacgccgccccaggtgaccagcgccagcaaccacgggctctgcatcaataacgcgctgccaccaaaaatcccggcgcaaatcaggaccaaatcgctgatagcacaaagtaaggcaatcataatgtggtactgacgacgtatgccctgattcatcacaaaagcattttgtggaccgagcggtaggatcatagccgccccaagtgcaagaccttgaaagtaataagaaaacacgttggatattccgaattaagtatctgatgcagagactatatcgcgggattgttattagcggaaattgataatattaattggcaatcagaaaaactaataagagagaggccagagagtattatctggcctcagcgttgattacgcagctttgtcttctttcacccgcttaaagttcacatccatttgcgggtacgggaagctgataccggcggcatcaaattcacgtttaatacgctccagcacatcccagtacacgttttgcagatcgccgctgttgctccagacgcggaccacgaaattaatgctgcttgcaccaagttcgttcaggcgcacagtcatttcgcgatctttcaaaatgcgatcttcagactggataatattggtcaggatctgcttaacctgatcgatatcggaatcatacgccacgccaataataaattcgttacggcgaactggctcgcgggagaagttaataatatttccggcaataattttaccgttcggaataacgataattttaccgtctgcagtacgcatggtggtggagaaaatctgcacactcagcacagtaccggctacgccgcccaggtcaacatattctccggcacggaacgggcggaacatgacaagtaacacgccagcggccaggttagacagactcccctgcaaagccagaccaacagctaagcctgcggcaccgagtacagcaatgacactcgcggtttgtacacccacgcgtcccagtgcagcgattagcgtaaaggcgataataccgtaacggactaatgcagaaagaaaatcagcaacagtggcatcgattttacgggagatcatcaggcgattcaccgcgttggaaatcatccgcgcgataatcaaaccaacgatgatgatcgcgagtgccgccacgatgtttactgcataacttagcagcagcgcctggttagctaccagccagcttcccgcgccgtttatgctatcgacaacattcaaatcttccattcaatattccttttcaactgactcaaaatggagaaatacactccgccgccttatgacgggcagtctgacaagggtaaacaataaagcataattttgccaaatagatcacagatttctcatctgaatcaccttgcttttggcgaaaaaatccccgcagagcggggctcagacagatatcaatgtgcgctttgtcatgccggatgcggcgtgaacgccttatccggcctacaaaaacctgcaaattcaatatattgcaggatacgtgtaggcctgataagcgtagcgcatcaggcaattttgcttttggcgaaaaaaagacccgcagagcgggccttgagataagcagaaaggaatatcttacagaacgtcgatcgcgttcagttcctggaatgctttctccagacgagcgatcatgctagtctgaccggcacgcagccatacgcgcggatcgtagtatttcttgttcggctgatcttcgcctttcgggttacccagctgaccctgcagataagcttcgttcgctttgtagtagttcagaacgccttcccaggttgcccattgggtatcggtatcgatgttcatttttactacgccgtagcttacggagtctttgatttcctgagcagtagaaccggaaccaccgtggaatacgaagttcaggctgttgtgcggcaggttgtgtttcttggaaacatattcctgagaatcacgcaggatggtcggagtcagaaccacgttacccggcttgtaaacaccgtgtacgttaccgaaggacgctgcgatggtgaaacgcgggctgattttgctcagttcggtgtatgcgtaatcaacgtcttccggctgggtgtacagtgcagaagcgtccatgtggctgttgtccacgccgtcttcttcaccaccggtgcaacccagttcgatttccagagtcatgccgattttggacatgcgctccaggtatttagagcagatttcgatgttctcttgcagagattcttcagacaggtcgatcatgtgagaagagaacagcggcttaccggtagctgcgaagtgtttttcacccgcgtccaacagaccgtcgatccacggcagcagtttcttcgcgcagtggtcagtgtgcaggataaccggaacaccataatgttcagccatctggtgaacgtgatgcgcaccagagatcgcgcccaggatagcagcaccctgcggaacgtcagatttcacgcctttaccagcgataaaggaagcaccaccgttggagaactgaacgataaccggcgctttaactttagcagcggtttccagtacggcgttgatggagtcagtaccgacgcagtttactgctggcagtgcgaagttgttttcttttgctacctggaaaactttctgtacgtcatcaccagtgattacgccaggttttacgaaatcaaaaatcttagacatgtctcttgtcctgtatcgtcgggccttatactcgtcatacttcaagttgcatgtgctgcgtctgcgttcgctcaccccagtcacttacttatgtaagctcctggggattcactctcttgtcgccttcctgcaactcgaattatttagagtatgaaaaattgcgtgctctaaaagcgcgctgaaacaagggcaggtttccctgccctgtgattttttacttcttagcgcgctcttcgagcatcgctactgcaggcagtactttaccttccacgaattcgaggaatgcgccgccgccagtggagatgtaggagattttgtcagcaatgccgaacaggtcgattgctgccagagtgtcgccgccgccagcgatggagaacgcttcgctgtctgcgatagcgttagccacgatttcagtacctttgcggaagttcgggaattcgaacacgccaaccggaccgttccacagaatggttttcgcattcttcaggatttcagccagttcctgagcggaagcatcaccgatatccaggatctgctcgtcagctttcacatcgttaacagatttcagggtagccggtgcagtttcagagaactcggttgctacgcgaacatcagacggaaccgggatgttgcaggtggtcagcagacgtttagcttcgtcaaccaggtcagcttcgtacagggatttacccacatcgtggccttgtgccgcgataaaggtgttagcgataccaccaccaacaatcagctggtcagcgattttagacagggagtccagaacggtcagtttggtagatactttagaaccaccaacgatagccaccatcgggcgagcaggttctttcagtgctttacccagcgcgtccagttcagctgccagcagcgggcctgcgcacgcaacgtcagcgaatttaccgataccgtgagtagaagcctgcgcgcggtgagcagtaccgaatgcgtccattacgaacacgtcacacagtgcagcgtattttttggacagggtttcgtcgtctttcttctcgcctttgttgaagcgaacgttttccagaacaaccagttcaccttcagcaacgtcaacgccgtcgaggtaatctttaaccagacgaaccgggttagacagtttgtctttcaggtagttaacaaccggcagcagagagaattcttcgttgtactcgccttcggtaggacgacccaggtgggaagttaccatcacttttgcgccttgtttcagggccagttcgatggtcggcagagaagcacggatacgcgcgtcgctggttactttcccgtcttttactggtacgttcagatccgcacggataaatacacgtttcccagcaagatccagatcggtcatcttaattacagacatggtgaatcctctcgttgattctaaaagttttgcagacgctgcttgcgtcttacctgaaagcaacagtagccatagctaacgtcgtgtcgagcattcggttagcaaagccccattcgttatcgcaccagaccaacgttttgatcaggtgtgcgccactgacccgggtttgggtgccatcgacaatggcactgtgcggatcgtggttaaaatctacagagaccaacggcaattccgtatagtcaactataccatgaaatgcaccttgtgctgctttttgcagcaacaggttgacttcattggcttttacaggtttcttcaccgtcacgcttaaatcgattgccgtcacatttatggttggcacacgtaccgcaatcgcttcaaagcgatcgttaaattgcggaaaaaatcgtgtgataccggcggccagtttagtatcgaccggaatgatgctctggctggctgcccgggtgcgacgcaggtcaggatggtatgcatcaataacctgttgatcgtgcatggcggagtgaattgtggtcacagtgccggactcaataccgtacgcatcatctaacaatttgatgacgggaattatgcaattcgtggtacaggaagcgttagaaacgatgcggtgttccgcacgaagttgatcctgattgacgccgtaaacaacggtcgcgtcgagatcgttactgccaggatgactaaagagcacttttttggccccggcggcaatatgcgcttcgccatgctcgcgggagccatatacgccggtgcagtcgaggactacatcaacgccaagttcacgccaggggaggctttgcagactacgttcatgcaatacgcggatggcgtcatcaccaacaaaaagttgatcgcgttcctgtcgtacttcccatgcaaaacggccatggctggtgtcatatttcaacaaatgcgccatgcccgcagcatccgccagttcgttgattgccaccacggtaatttccgcccggcgtccggattcatacaaagcacgaaccacattacgcccgatgcgaccgaagccatttatcgctacgcgtacggtcatagatctcctgcaaggttttccctgagcaaatttgccagacagagtaatccagcaaatcgtccggggaaaccttacctgtcgcaaactgcgactgattggttaattgtcgaacatttaatcgactgaaacgcttcagctaggataagcgaaacgtggaataaaaggaatgtttgtccagccgaagaagacatttatctgactcacatcacacttttatccccttttgtgggaagctttattccaggctggcgtaataataaccctacaataactggaataaattgtcagcttgtgaagtgataccggccttcttcagtcatctctactatcagattggcctgacggctattcatcagcacacgctcgacattggggccatcggtgcgggcataaaatgcttcggctacttgccgcgttaatcctcccgcaattttacgactaatcaagcgctcccgcagaatttgagcaggtgcatgaataaaaatagaaaaatcgcagaaagatgccaactccagccacttttcatcatccagtaacaaccagtttccttcgacgatgacgagtggtgcggtaacgtgcaacgcatcttcaacaggatcatgcttttgtcgatcgtactgcggccacgtacaatccccttccacgacctggcgcagattttccgtcagtttcgcaacgtcaaatgtctctggtgcgcctttgaaggggcgcaattgatgcgcatccagccagctattgtaatggtgaaaaccatccatcgggagcgtctgaatagcgggcagttccgggtcttgttgcgcgagatattcccagaaggtggttagggtacttttacccgtccccggcggagcgcaaagaaaaaccaccgtacgccgctgcggatttaccgtctgtaaggccgccaacatgtgcagcaacggtttatgtacattttcaatctcttcgttctggtactgtgcctgtatcttcagcccattcaccgttaattcaattttcacggcgttaattcctttaaggtggtcgttactgccagcgtcagcgccgttttgaccattccgctaaaacgcgcctcactccagacggagaaatcagcgaacttcatcgcttttaacgcgtcatagagcatcgcattgcgggttatgctattgacgttgctgataaaatcccaggtcatgtcatcggcaaatccgggcgtttcatcctgttcgttcaggtaatgccagaactgggaaaaatgcgtgatatcggcgtacaaccatttatccattttcccaacgcataaatcaaacgcagtgcaacatcaatatcgtcaagcgggccgctttgggcgagtaacggcttcactgcatattccacgatctcttcatcgttatcgacaaacaggctcggcagaaactggcgtatcccctggagcaaaatggtatgcgcagttttcataaaactaaataaattgtcctgtgcatccagttgctcaagcacatcatcttctgtcagcgtcgccattggtcttccgatagatcaccatcaatgcagggagtctattatattacacgtttggtccgcgccgccgatcagtaatgtctgcgtccgcaccccattcgccgtctgttggataccgttcaccagctcaccgcccgtcacgcccgtagcgctaaagaggatatcgttccccctcaccagttcatcgaggctgtacacacggttaacgtcaacgcccattgccttgcaacgcttgcgctcctgctctgcaatctgccgattttccgtgtaatcccctttagcctggcaaaagtcaatcagctcggcctgcatatccccgcctaatgctttaacggcacaggcagaaatcacgccttctggcgcaccgccgatggtgtacatcacatcgtaaggattatcctgccagcaggtcagcacgctggcggcgacatcgccatccggcagggcaaaaaccttcacgcccagctgtgttgcttcctcaatcgcggcactcaggcgcggtttatccagcgtaaccatgcgcagcttatccagcggtttgcctaacgctttcgccacgttgcgcaggttgtccgtcagaggcaaagacagatcaatcgcgcccgccgccagccgattaacaaccagctttttcatatacatatcgggcgcatgtaacaggctatctcgaggggcgaaagccatgaccgccagcgcattgctctgccccatcgccaccatccgcgtgccttcaatgggatcaaccgcgatatcgacttctggcccatcgcctttgcccacctcttcgccaatccacagcatcggcgcatggtcaatttctccttcgccgataaccactcgtccacgaaaagcgacgtcgtttaatgcctggcgcatcgcggtgaccgccaggccatcaattttatttttgtcgccacatccggtttgcggccaggcagccaacgctgcctgttccgtaacgcgaaataatggccacgccagggacatcattgcgcggcctccccgatatcaacgccaaattgtgccagcagatatttctcggcctgttcattccagatgccgtgcgtttcctcaaccagccgcgccaactctttaaacagcggatcggttttgcctttttcggcaaaatcggcaatggcagtgagcggcatggtcacgccgttataaatgagttttttaccgccagggatatccggcagattgagcacggtttctggcaccgcatccaggccaccgatatgggtcaccataaagctcggctgtaactgcccagtggcgctaagggcaatcgcctctttcatgtcgtccgtactaccgccagatgtaccgacgacgtgcgtgctgttgtaatggacgttgtagaaattaaacggcactttgaagtttttatccgtcggcccggcaaagaagttcagacagccatcttccgccagtaattcatcagccatctcaacgacagcaggcaccgccgcataaacaaaaatgtcatcgaacccggcatctcctgtcagcgcccgcagcatctggacaggatcgctcatccctttggtattcacatacaccagctcaatgcctttactggccgccagttccaccggcagcagcttctgtacctgcgccagacgtttgtcgtcgatatcgaccaccaccacccggctcggttgtatgccgccgttaatggcgtaatcgatagcgccaatgcccatcggacctgcacacgccagcagtgcaatattgccgccaggtttgacgcccatgcgatgctcataaacatattgcgtggtgtgataattggcatgataagcaccaataatgcagcacataggctctgccaggctcgccgcagcaaaataagagccgtgatacggtaatacgcagcccaaattaatggcgatttcgggaataatcatataagtggcattgccgccaaaatattcgtagctgtagcccgcactatatccgcttggtaaccccatcgccggttgcaatacaaaacgctggccttttttatatttgccagtgagatttttacccacttcgacaataaccccggcacattcatgcccggtaatgaccggatgattttctaaatcgtcgggtacgcgtttatgttcactaccgagtaacgccgctttccaggtgcttaaacagacgctgtcagaaattacactcaccagtaattcattatcggtaatttctggcagttcaaatacgcgcagacggacatcccgcttgccataaatagcagcaactttggttttcatttttacctctgtaatcagtgtttatgttcggcggttaattgattaaataaagtgtcgagttttggatcgccaatatagttattaatcaatatcagtggtttatccgtcacacgtttcacgcgcccttccagactggcatgagtaacgacgatatccgcatccgcaggcacgttttctatggcgtaatgttttacttcaattgccagccccgctttttccaggcgtttacggaaggtggtcgcgcccatcgcactggagcccatccccgcatcgcaaacaaaggcgatacgcttaaccctgcttaagctgaatgcaccctcttgtttcatcgccttaaccgcattggcactctgagcaaactcatcttcgctctccgtttccaccgttttttccatcttcagtatcaggctagtaatagcaaaggacaccagggtacctaccgtaacaccggcaattgtcgccaggaagctgcctttcggcgtcagtgccaggtaagcaaagatagaccccggacttgggccagccaccagaccaccgtccagtaagttaaacatccaggtgccagacataccgcccgcaatcatggcaataatggtcagcggcttcatcagcacatacgggaaatacagttcgtggatcccaccgaggaagtgaataatcatcgccccgggcgcagaacgtttactcatccctttaccaaacaaggtaaacgccagcagcagccccaggcccggacctgggttagaggccaccataaagaagatggatttaccgttaacgctagcctgttgcattcccagcggataatagacgccctgatcgatcgcattattgaggaaaagcactttcgccggttcattgatgacactcaacaatggcagataacccgcatgtaccagcgcctcaatacactctttgacgaaagtattggcaattaacaccgccgggccgataacttcaaaacccagcagacaaaggagcatccccgcgatacctaaactgaagttattgataaccatctcaaaaccggcaggtatgcgtttttccagtgccttatcgacatattttatgaccaacccaccgagcggccccatgatcatactgccaaggaacatcgggatctctgcgccaacgatcacaccaatagtacctattccgcccatgaccgccccgcgtttaccgccgaccagatgaccacctgtagaaccaatcatcacgggcaataaataggtaatcatcgggccgacaattttggcgaaatgttcgttaggcagccaaccggtgggaataaataacgcagtaataaaaccccaggcaataaaagcaccaatattggggatgaccattgcagtcaaaaagcccccaaaagcctggacctttgcacgagcagacttgttttccataatattatcctgtagaggagagagtaattatccgcggctgataatgtccgctaattgtttttcactacttgctgttaagagttgttcgagtatttcttcttcgcacagtaattcacttaacgcctgaatagcgccaatgtggctatcggcatcggcagcagagagtccgatgagtaatttaattggttcgtcattccccggaaaataaacaccttgttcaagtaatgtcaaagacatcccggttttaagcgccccacattccggtcgcgcatgaggcattgccacgcctggtgcgagaatataataagggccattgttaatggtggaatctttaattgcctgaatgtaattctcgctgatatagtttttatccagcaaacttaccatgctgaaatcgatagcttcctgccaatcttttgcactatgtataacactgatactactttctggaaaataatcactaagccgcataaattatccttattttatttttagggtaccgtccggcggtaaaaataaaatactcgtgcggtttaatgaaagcaattgagcagggaaaccggtgttttgaaaacagtgaattattaatttcttatataacattgagttatagatataacaacaaatgtcaatacgcatatcgtgatgcatattacataattgatatttattgcatataaatatttgtgatctacaacacgccttatctattgcttgtccgcaaacggacatatcaaggtaataaaaaaggtcgccgaagcgacctttttacccgaaatgctaattacagcagttcttttgctttcgcaacaacgttatcaacagtgaagccgaactcttcaaacagcagctctgccggagcagattcaccgaaggtggtcataccgacgatagcaccgttcaggccaacatacttgtaccagtagtcagcaatacccgcttctacagcaacgcgtgcagtaaccgctttcggcagtacggattcacggtaagcagcatcctgcttgtcaaatgcgtcggtagacggcatggacaccacgcgcgctttcacgccttcggcagtcagtttttcgtaggcagcaacagccagttcaacttcactaccggtagcgatgaaaatcagttccggctgaccggcgcagtctttcagcacataaccaccgcgcgcgatgtttgccagttgctcttcagttcgttcctgctgcgccaggttctgacgggagaggatcagtgcggtcgggccgtcctgacgctcaacaccgtatttccacgcgaccgcggattcaacctggtcacacggacgccatgtagacatgttcggggttacgcgcagagaagcgacctgctcaaccggctggtgagtcgggccgtcttcgcccagaccgatggagtcgtgggtgtaaaccatcacctgacgctgtctcatcagcgcagccatacgtacggcgttacgtgcgtattccacgaacatcaggaaggtggaggtgtacggcaggaagccaccgtgcagggagataccgttagcaatcgcggtcataccgaactcgcgaacaccgtagtggatgtagttacccgcagcatcttcgttgattgctttagaaccagaccacagggtcaggttagacggcgccaggtcagcagaaccgccgaggaattccggcaacagcggaccgaacgcttcgatagcattctgagacgctttacggctggcgattttcgccggattagcctgcagtttagcgatgaactctttcgctttagcgtcgaagtcagacggcatttcgcctttcatacggcgggtaaattcagcggcttcctgcggataagctttcgcgtaagcagcgaatttctcgttccatgcggattctttcgcctggcctgcttctttcgcatcccactgagcatagatttcagacgggatttcgaacggcgcatatttccagcccagttgttcgcgggtcagggcaatttcagcgtcgcccagcggcgcaccgtgggagtcgtgggtaccggctttgttcggggaaccgaaaccgatgatggttttgcacatcagcagggaaggtttgtcagtcactgcgcgcgcttcttctactgcgcgtttgatagatgccgcgtcatgaccgtcgatgtcgcgaataacgtgccagccgtaagcttcgaaacgcattgcggtgtcgtcggtgaaccagccttcaacgtgaccatcgatagaaataccgttgtcatcgtagaatgcaatcagtttacccagcttcagcgtacccgccagagagcaaacttcgtgggagatgccttccatcatgcagccgtcgcccatgaaggcgtaggtgtagtggtcgacaatgtcgtggcccggacggttaaactgcgccgccagcgttttttctgcaatcgccataccgactgcgttggcaataccctgacccagcggaccggtggtggtttccacaccagcggtgtaacccacttccgggtgacccggagttttagagtgcagctgacggaagtttttcagttcttccatcggcagatcgtaaccggtgaggtgcagcaggctgtagatcagcatggagccgtggccgttggacagcacgaagcggtcacggtcagcccaggacggattctgcgggttgtgtttcaggaaatcacgccacaggacttcggcaatgtcagccatacccataggggcacccgggtgaccggatttggctttctgtactgcgtccatgctcagcgcacgaatagcattggcaagctctttacgactggacattttgactccagatcggatgatgaagggcacgcccttaacgacttgacgacagcgcgttttgggctacgccggaaaatttgccaacaatttaccacaagccgcgcgtcatgtacatggaacatccttttgccgcttcagaaatctctggatcatgctcgcatgttgcgcaatctactcgcccgtccgctgcgcttttccttatactgagactgagcgtcgattcacctgcaaacggcgcatttttagaataatcctgaccttgtgcggaagagaaaacatgaaaattcgcgccttattggtagcaatgagcgtggcaacggtactgactggttgccagaatatggactccaacggactgctcagtagtggagcggaagcttttcaggcttacagtttgagtgatgcgcaggtgaaaaccctgagcgatcaggcatgtcaggagatggacagcaaggcgacgattgcgccagccaatagcgaatacgctaaacgtctgacaactattgccaatgcgctaggcaacaatatcaacggtcagccggtaaattacaaagtgtatatggcgaaggatgtgaacgcctttgcaatggctaacggctgtatccgcgtctatagcgggctgatggatatgatgacggataacgaagtcgaagcggtgatcggtcacgaaatggggcacgtggcgttaggccatgtgaaaaaaggaatgcaggtggcacttggtacaaatgccgtgcgagtagctgcggcctctgcgggcgggattgtcggaagtttatctcaaagtcaacttggtaatctgggcgagaaattagtcaatagccaattctcccagcgccaggaagcagaagccgatgattattcttacgatcttctgcgccaacgcggcatcagcccggcaggtcttgccaccagctttgaaaaactggcaaaactggaagaaggtcgccaaagcagtatgtttgacgaccatcctgcatccgccgaacgcgcccagcatattcgcgatcgcatgagcgcggatgggattaagtaaagcctggtggtgtcgaacgtaggtcagataaggcgttcacgccgcatctgacatgaatggcacatttgttaccttgtgcgcattgccggatgcgatgctggcgcatcttatccggcctacgggtgccgaacgtaggtcggataaggcgttcacgccgcatccgacattaatggcacgttttacccgtgcgcatcgcatctggtgcttactcgccctttttcgccgcctgaatatacagcatttccagcgccagcgttgccgctgccagagcagtgatttcgctctgatcgtatgccggagccacttccactacgtccatcccaacaatgttgagatctttcaggccgcgtaccagtttaatagcgcgatcggaggtcaggccgccaatcactggcgtaccggtgcctggtgcaaaagcaggatccaggcagtcgatatcaaaagtcaggtaaaccggcatatcacccacaatctgtttcacttgggcgataacgtcatccacgctgcgatcgttcacctggcaggcgtccagcacggtaaagccgttgtctttatcaaactcggtacgaataccaatctgcacggaatgattcgggtcgatcagaccttctttcggcgcggtatagaacatagtgccgtggtcaaattcacaaccgttcgcataggtatcggtgtgggcgtcaaagtgtaccagcgccattttgccgaaatgcttcgcatgagcacgcagcagcggcagcgtaacaaagtggtcaccaccgaaagagagcatacgcttaccggcagccagcagcttctcggcgtgcgcctgcagcttttcgctcatctcacgggcatcgccaaaggcatataccagatcgccgcagtccacgacgttcagacgctcacgcatgtcgaaattccacgggaagcggttgtgttcccaggccagattcgtgctaacctgacggatcgctgccggaccgtggcgaccacccgcacgaccagaagtggccatatcgaacggcacgccagtaatcacccagtctgcatcgctgtcatacggctggaagttcatcggcaggcgtaaaaaaccaaaggcattggaaaccagactgttatcgtattgatgacctaaggtgctcatggatggactcctattacaaagtcgatataaaaaaacccttccgcgtcgttaggcccgacgaggaagggttggatttgtcacaataaattgtggcggattatcaccgctaaattaagcggattcaagtaacacaggacttactcatcttcaagataagtataaccgtacaaacctgcctcgaactcttcaaggaactgttgttgcagttcagcatcaagatcggttttcttcacttgatcgcggaactgggttaacagcgttttcggatcgagctgtacatattgcagcatgtccgccacggtatcgccttcgtcagacagttctacttctacgctaccgtcagggaagacgaacacgtcaaccgcttcggtatcaccgaacaggttgtgcatgttgccgaggatctcctgatatgcgccgaccataaagaaaccgagcatcggcggattctctggatcgtactccggcattggcattgtcgtggcaataccgtcaccatcaatatagtggtcgatagcaccgtcagagtcacaggtaatatccagcagcacagcgcgacgttccggcacttgatccagcccttccagcggcagaaccgggaacaactggtcgatcccccatgcgtccggcatgctctggaacaggctgaagttgacgtacattttgtccgccatacgttcctgcagctcgtcgataatcggacgatgagcacggttttgcggatccagctgcttttgcacttcatggcacatgctcaaataaagctgctcagcccatgcacgttcttgcaggctaaagatgccggaagagtagccgatatgaatgtcgtgcagatccatctgactgtcgtgtaaccattcacgcagagaacggcgagttcccggttcgtgcatctcctgccaggtttcccacatgctttgcagcgcgcgcggcgcatcttctgcaggcgcggtcggcaccgtgtattcgttacgttccacgccgatgatattagacaccagcacggtgtgatgcgcagtcaccgcacgaccgctttcggtgattaccgtcggatgcggcagaccgttttcttcacacgcatcgccaatcgcccagataatgttgttggcgtattcattgaggccgtagttcacgctacagtcggactggctacgagtaccttcataatccacgcccagaccgccgccgacgtcgaagcactgaatattgacgcccagcttgtgcagttccacatagaaacgcgcggattcacgaacgcctgtcgcgatatcgcgaatattcgccatctggctaccgaggtggaagtgcagtagttgcaggctgtcgagacgcccggcttcacgcagggtttcaaccagttgcagtacctgagtcgcagccaggccgaacttgcttttttccccgccggaggactgccatttaccgctaccctggctagccagacgtgcacgcacgcccagacgaggaacgacattcagacgttctgcttcatccagcacaatggcgatttcactcatcttctcaatgaccagatagaccttgtgccccatcttctcgccaattaatgccaggcggatatattcgcggtctttataaccgttgcagacgatgacgctacgggtcatgccagcatgtgccagtactgccatcaactcggctttggaaccggcttccagacccagcggttcgccgctatgaatcagggactcaatcacgcggcggtgctggttaactttgatcggataaacaaggaagtaatcgccgttatagccgtaggattccctcgcacgtttgaacgcggcgttaatggaacgcaaacggtgctgcaggatctgtgggaaacagaacagtgcaggcagacgctggccctgtgcttcacgagttttcactaactgcgcgagatcgacgcgagcttccgggacgtccgggtccgggcacacgctaatgtggcccagctcgttaacgtcatagtagttattgccccaccaggcaatattgtaagtacgcagcatcttgctggcttcctgggagctcattgcaacctcctgcatggagcgtagtacaccgtgttcgcccgcactgctaggcaaacccatagacatgtcgtcagacatagcgaacctcaaattattttattaagtgtaaaacagttaacgactatcgcagcctggaactggcttaacaacccataagcacatggattttccagcagactatgctgacgctccaactgcgcaaccggtttctttttcataacattattaagcacataaccgaacgtaagtgtgaaagttcggcgaaaccacgagaaaactcttgtttttacaagagcgcccttgttcagtcctcagtaactgtaaccagctcttgaatcctgagaagcgccgagatgggtatagcaagcgcaggtatgcaaagcagagatgcagagtgcggggaacgaatcttcaccagaacggtgagacaggttaagcagcagacaacggttcattatttcgtaagtcctccacggccgcctgttaagacgaacccacaagccaaaactctgattagtacccggctggaagtggcaacacgaaagaaacgtcgtgtgctttttatttaagccgcgcgccgcgttttataccccacaatggcagaaaattgcaaaagataaatacgcagaatgccggcattgtcaggaaaaatttccagccacgtttttaacagaatgagacagctttcaaaaaaaagtggaaatagggtgaagaattgacctaaaatagccatccagatgttaatccatccataccgattaacactcagactgccagtgtttttaacctgcagagtcgtggtaggatccgctaccacagaaaatccacacaacagtttgagctaaccaaattctctttaggtgatattaaatatggcaaaacacctttttacgtccgagtccgtctctgaagggcatcctgacaaaattgctgaccaaatttctgatgccgttttagacgcgatcctcgaacaggatccgaaagcacgcgttgcttgcgaaacctacgtaaaaaccggcatggttttagttggcggcgaaatcaccaccagcgcctgggtagacatcgaagagatcacccgtaacaccgttcgcgaaattggctatgtgcattccgacatgggctttgacgctaactcctgtgcggttctgagcgctatcggcaaacagtctcctgacatcaaccagggcgttgaccgtgccgatccgctggaacagggcgcgggtgaccagggtctgatgtttggctacgcaactaatgaaaccgacgtgctgatgccagcacctatcacctatgcacaccgtctggtacagcgtcaggctgaagtgcgtaaaaacggcactctgccgtggctgcgcccggacgcgaaaagccaggtgacttttcagtatgacgacggcaaaatcgttggtatcgatgctgtcgtgctttccactcagcactctgaagagatcgaccagaaaagcctgcaagaagcggtaatggaagagatcatcaagccaattctgcccgctgaatggctgacttctgccaccaaattcttcatcaacccgaccggtcgtttcgttatcggtggcccaatgggtgactgcggtctgactggtcgtaaaattatcgttgatacctacggcggcatggcgcgtcacggtggcggtgcattctctggtaaagatccaagtaaagtggaccgttccgcagcctacgcagcacgttatgtcgcgaaaaacatcgttgctgctggcctggccgatcgttgtgaaattcaggtttcctacgcaatcggcgtggctgaaccgacctccatcatggtagaaactttcggtactgagaaagtgccttctgaacaactgaccctgctggtacgtgagttcttcgacctgcgcccatacggtctgattcagatgctggatctgctgcacccgatctacaaagaaaccgcagcatacggtcactttggtcgtgaacatttcccgtgggaaaaaaccgacaaagcgcagctgctgcgcgatgctgccggtctgaagtaatctttcttcacctgcgttcaaaggccagcctcgcgctggcctttttcttttggataggcgttcacgccgcatccggcaaaaaaaccgcccgcacaataacatcattcttcctgatcacgtttcaccgcagattatcatcacaactgaaaccgattacaccaaccacaacagacaaagatttgtaatattttcatattattattcggttttcacagttgttacatttcttttcagtaaagtcttaattgcagataacagcgtttaatctatgatgatataactcaattattttcatgcacttaaatcataactaagataaatgttagtgtaagcgattacactgatgtgatttgcttcacatctttttacgtcgtactcacctatcttaattcacaataaaaaataaccatattggagggcatcatgcctgacgctaaaaaacaggggcggagtaacaaggcaatgacgtttttcgtctgcttccttgccgctctggcgggattactctttggcctggatatcggtgtaattgctggcgcactgccgtttattgcagatgaattccagattactagccacacgcaagaatgggtcgtaagctccatgatgttcggtgcggcagtcggtgcggtgggcagcggctggctctcctttaaactcgggcgcaaaaagagcctgatgatcggcgcaattttgtttgttgccggtagcctgttctctgcggctgcgccaaacgttgaagtactgattctttcccgcgttctactggggctggcggtgggtgtggcctcttataccgcaccgctgtacctctctgaaattgcgccggaaaaaattcgtggcagtatgatcagcatgtatcagttgatgatcactatcgggatcctcggtgcttatctttctgataccgccttcagctacaccggtgcatggcgctggatgctgggtgtgattatcatcccggcaattttgctgctgattggtgtcttcttcctgccagacagcccacgttggtttgccgccaaacgccgttttgttgatgccgaacgcgtgctgctacgcctgcgtgacaccagcgcggaagcgaaacgcgaactggatgaaatccgtgaaagtttgcaggttaaacagagtggctgggcgctgtttaaagagaacagcaacttccgccgcgcggtgttccttggcgtactgttgcaggtaatgcagcaattcaccgggatgaacgtcatcatgtattacgcgccgaaaatcttcgaactggcgggttataccaacactaccgagcaaatgtgggggaccgtgattgtcggcctgaccaacgtacttgccacctttatcgcaatcggccttgttgaccgctggggacgtaaaccaacgctaacgctgggcttcctggtgatggctgctggcatgggcgtactcggtacaatgatgcatatcggtattcactctccgagcgcgcagtatttcgccatcgccatgctgctgatgtttattgtcggttttgccatgagtgccggtccgctgatttgggtactgtgctccgaaattcagccgctgaaaggccgcgattttggcatcacctgctccactgccaccaactggattgccaacatgatcgttggcgcaacgttcctgaccatgctcaacacgctgggtaacgccaacaccttctgggtgtatgcggctctgaacgtactgtttatcctgctgacattgtggctggtaccggaaaccaaacacgttagcctggaacatattgaacgtaatctgatgaaaggtcgtaaactgcgcgaaataggcgctcacgattaatctccccaagcttcctcccatcgcggaggaagccacctcttgcagtcatcttttcttcgctctatcctctgccgctatgaaaacatcccgtctccctatcgccatccaacaggccgttatgcgtcgcctgcgggaaaaactcgcccaggccaacctgaagctagggcgtaactacccggagccaaaactctcttacacccagcgcggaacctccgccggaacggcctggctggaaagctatgaaattcgcctcaatcccgttttgctgttggaaaacagtgaagcttttattgaagaagtggtaccgcacgaactggcacatttgctggtatggaaacatttcggccgcgtagcgccacatggcaaagagtggaagtggatgatggaaaacgtgctgggtgttcccgcccgtcgtacgcatcagttcgaactgcaatccgtgcgtcgcaacaccttcccctaccgctgcaagtgccaggagcatcagcttaccgtacgccgccataatcgcgtagttcgtggcgaggccgtctatcgctgtgttcactgcggtgaacagctggttgcgaaataaccatctgaactatcaggaactttcctgatttggctgattgcataccaaaacagctttcgctacgttgctggctcgttttaacacggagaagtgcctacactagcgggattctttttgttaacccctaccccacgcgtacaaccgcgtggggagacgacgcggatttttaactatgcgtatcccccgcatttatcatcctgaaccactgaccagccattctcacatcgcgctttgcgaagatgccgccaaccatatcgggcgcgtactgcgcatggggccggggcaggcgttgcaattgtttgacggtagcaaccaggtctttgacgccgaaattaccagcgccggcaaaaaaagcgtggaagtgaaggtgctggaaggccagatcgacgatcgcgaatctccgctgcatattcacctcggtcaggtgatgagccgtggtgaaaaaatggaatttactatccagaaaagcatcgaactcggtgtaagcctcattacgccacttttttctgagcgctgcggcgttaaactggatagtgaacgtctgaacaagaagcttcagcagtggcagaagattgcaattgctgcctgtgagcagtgtggtcgtaaccgggtgccggaaatccgtccagcgatggatctggaagcctggtgtgcagagcaggatgaaggactgaaactgaatcttcacccgcgcgccagtaacagcatcaatacgttgccgttaccggttgaacgcgtccgcctgctgattggcccggaaggcggtttaagcgcagatgaaattgccatgactgcccgctatcaatttactgatatcctgttgggacctcgcgttttgcgtacagagacaactgcgctcaccgccattaccgcgctacaagtacgatttggcgatttgggctaacggagaagaataatgatcaagctcggcatcgtgatggaccccatcgcaaacatcaacatcaagaaagattccagttttgctatgttgctggaagcacagcgtcgtggttacgaacttcactatatggagatgggcgatctgtatctgatcaatggtgaagcccgcgcccatacccgcacgctgaacgtgaagcagaactacgaagagtggtttagcttcgtcggtgaacaggatctgccgctggccgatctcgatgtgatcctgatgcgtaaagacccgccgtttgataccgagtttatctacgcgacctatattctggaacgtgccgaagagaaagggacgctgatcgttaacaagccgcagagcctgcgcgactgtaacgagaaactgtttaccgcctggttctctgacttaacgccagaaacgctggttacgcgcaataaagcgcagctaaaagcgttctgggagaaacacagcgacatcattcttaagccgctggacggtatgggcggcgcgagcattttccgcgtgaaagaaggcgatccaaacctcggcgtgattgccgaaaccctgactgagcatggcactcgctactgcatggcgcaaaattacctgccagccattaaagatggcgacaaacgcgtgctggtggtggatggcgagccggtaccgtactgcctggcgcgtattccgcaggggggcgaaacccgtggcaatctggctgccggtggtcgcggtgaacctcgtccgctgacggaaagtgactggaaaatcgcccgtcagatcgggccgacgctgaaagaaaaagggctgatttttgttggtctggatatcatcggcgaccgtctgactgaaattaacgtcaccagcccaacctgtattcgtgagattgaagcagagtttccggtgagcatcaccggaatgttaatggatgccatcgaagcacgtttacagcagcagtaacccaccttagcgagaaggatctcgttgagactctgagtgacagcgcccttctttccacgcatactgggcgctgttgcttttttgaaccaggaaacagaacctctgacaatgaatttacagcatcactttcttattgccatgcctgctctccaggatccgattttccgtcgttccgtggtctacatttgcgaacataataccaatggtgcaatggggatcatcgtcaacaagccgctggaaaatctcaaaattgaagggattctggaaaagctgaagatcacgccggagccgcgtgatgaaagtatccgtctggataaaccggttatgctcggcggtccgctggctgaagatcgcgggtttattttgcatactccgccctccaattttgcttccagcattcgcattagtgacaacacggtaatgaccacttcccgcgatgtgctggaaacgctcggcaccgataaacaaccgtctgacgtattggtggctctgggttatgcctcctgggagaaaggtcaactggaacaagaaattctcgataacgcgtggctaacggccccggcagatctgaatattctgttcaaaacgccgattgccgaccgctggcgcgaggcggcaaaactgattggtgtggatattctcaccatgcctggtgtggcaggacacgcctgatgagtggaaccttactcgccttcgacttcggcaccaaaagcattggcgtagcggtcggccaacgcattaccggcaccgctcgccctttgcctgcaattaaagcacaggacggtacgccggactggaacattatcgagcgtttactgaaagagtggcagccggacgaaatcatcgtcggtttgccgctgaatatggacggcaccgagcaaccattgactgccagagcgcgtaaatttgccaaccgtattcatggccgtttcggtgttgaagtaaagctccatgacgagcgtcttagcactgtggaagcccgttccggtctgtttgaacagggcggctatcgggcgctcaacaaaggcaaagttgactctgcctctgcggttattattctcgaaagctatttcgagcagggatattaaggcgatttaaacgcctggcggagtgtaaataatatcatcgcgtcttattgccggatgcggcgtgaacaccttatccagcacacatctggcagcggctataggtctgataagacgcgttagcgtcgcatcagacatttattgcctttgtaggcccgataagcttgcgcatcgggcatggcaacgtcacaaacgcccttcccccacccggtgctgataactctgctgaaacgttatcatccccacctgctgcccggtttgaataacatgcggtaactggtgggttttcccttcgcgaatcaaattccccaccgcgggtgtgttaatcagcaattcaaatagcgccacgcgtccttcctgtttatccacttccagcttttgactcagcactgcccgtaaactacctgccagttgattacgcacggggtctttttcctgcgccggaaaactatccaccagtcgctcaactgcctgcgcggcaccacgcgtatgtaatgttgccagcaccaaatgcccggtttctgccgccgtcagtgccagacggattgtctcgctgtcacgcagctctccgagcaaaatcacatcaggatcttcccgcaatgcggcccgcaatccgcttgcgaacgtcatacagtgcaaaccaatttcccgctgctggatcaaacatcgctggctggcatagagatattcaacaggatcttccagcgtcagaatatgcgcatcggcatgttgattgagatagccaaccatcgccgccagcgtggtagatttgccactccccgtcgcccccgtcaccagaatcaggccattctcgctcttgagtaattccggcaataccgttggtgcgccaagctgttcgagctgcgggcagtggctaggtaacagccgtaacgccaggctaatgccatgccgttgcgcgaatgcgctgccacgcaatcgctggttttccgccaggctcacggcaaaatccagctgaccattctccagcaatattgcccgctgatcgtcatccagccactcccgcagtagctcttcgacgtccggcgtatcaaacggcgcagcttccattctgccgcgaatgcgccatcgtgcgggccaggcgctgcacaggtgtagatcgctgacgttatgctttacactaagggccacaatttcttccatattcatactaagatcctcggaaaatgaacgatattgcgcataacctggcacaggtccgggacaaaatcagtgcggctgcaacgcgttgcggccgttctccagaagaaattacgctgcttgcagtcagtaaaacaaaacctgcgagcgccatcgcagaagccattgatgccgggcagcgtcaatttggtgaaaactacgttcaggaaggggtagataaaattcgccactttcaggaactgggcgtaacaggattagaatggcattttattggcccgttgcagtctaataaaagccgcctggtggcagagcatttcgactggtgtcataccatcgaccgtttgcgcatcgctacccgtctcaacgaccagcgcccggcagaacttccccctcttaacgttctgattcaaattaacattagtgatgaaaacagtaagtccgggattcaactggctgaactggacgagctggcagctgcggtcgctgaactaccgcgtttacgtctgcgcgggttgatggcaatccctgcgcctgagagtgaatatgtaaggcagtttgaagttgcacgccaaatggctgtagcatttgccggactgaaaacgcgctacccgcatatcgacacgctctctctgggaatgagcgacgatatggaagccgccattgcggcaggtagcacgatggttcgtatcggcactgcaatttttggtgcgcgtgattactctaaaaaataaggaattaaaggaacgccatgaatacgttgactttcctgcttagtacggtcattgagctgtataccatggtgctgttattacgcatctggatgcagtgggctcattgtgatttttacaaccccttcagtcagtttgtagtgaaggtaacgcagccaattatcgggccactgcgccgcgttattccggcaatggggccaattgacagcgccagcctgctggttgcctatattctcagttttatcaaagccatcgtgctgtttaaagtggtgaccttcctgccaatcatctggattgccggtttactgattctgctgaaaaccatcggcctgctgattttctgggtcctgctggtgatggcgattatgagctgggtaagccaggggcgtagcccgattgaatacgtgctgattcagctggccgatccgctgctgcgcccgattcgccgcctgctaccggcaatgggtgggattgatttcagcccgatgatcctcgttctgctgctgtatgtcatcaatatgggtgtcgcagaagtattacaggcaaccggaaatatgctgctgccagggctgtggatggcgttatgaatgccgtaacagttaatgatgacggtctggttttacggctctatattcagccgaaagccagccgtgattctattgtcggtttacatggcgacgaagttaaagtcgccattaccgcgccgccggttgacggccaggccaacagtcatctggtgaagtttctcggtaagcaattccgggttgccaaaagccaggtggtgattgaaaaaggcgaacttggccgccacaaacaaattaaaatcattaatccgcaacaaatcccgccagaaatcgcggcgttaattaattaagtatcctatgcaaaaagttgtcctcgcaaccggcaatgtcggtaaagtgcgtgagctggcgagcctgcttagcgacttcggtcttgatatcgtggcccaaacagacctcggcgttgattccgctgaagaaaccggcctgacctttatcgaaaacgcgattctgaaagcgcgccatgcggcaaaagtgaccgctttaccggcaattgccgacgactctggtctggcggtagatgtgcttggcggcgcgccgggcatttactccgcgcgttattccggtgaagacgcgaccgatcaaaagaatctgcaaaaactgctggaaacaatgaaagacgtaccggacgaccaacgtcaggcgcgtttccactgcgtgctggtatatctgcgtcacgcggaagatcccactccgctggtatgccacggtagctggccgggcgtgattactcgtgaaccagcgggcactggtggctttggttatgatccaatcttcttcgtaccttccgaagggaaaaccgccgccgaactgacccgcgaagaaaagagcgccatttcccaccgtggtcaggcgttgaaactgctgctggacgctttacgtaatggttaaattacctccgctgagtctctacattcacatcccgtggtgcgtgcagaaatgcccgtactgcgatttcaactctcacgcgttgaaaggagaagtgccgcacgacgattatgttcagcatctgcttaacgatctggacaacgatgtggcttacgctcagggccgtgaagtaaagacaatctttattggcggtggtacgccgagcctgctttccggcccggcgatgcaaacgctgctggacggcgtgcgtgcgcgtttgccgctggcagcggatgcagaaattactatggaagcgaaccctggcacggtagaagccgatcgctttgtcgattatcagcgtgctggtgtgaaccgcatctctattggtgtgcagagttttagcgaagaaaagctgaaacgacttgggcgtattcatggcccgcaagaagcgaaacgcgcggcgaagctggcgagcggtttagggttacgtagctttaaccttgatttgatgcatgggctgccggatcaaagtctggaagaggcgcttggcgatctacgccaggccattgaactgaatccgccgcatctttcctggtatcaactgaccatcgaacccaatacgctgtttggtagccgaccaccggtgctgccggacgatgacgcgttgtgggatatattcgaacaggggcatcagttattaaccgcagcgggttatcagcaatatgaaacttccgcttacgccaaacccggttatcagtgccagcacaatctcaactactggcgctttggtgactacatcggtattggctgcggcgcacacggcaaagtgaccttcccggatgggcgcattctgcgtaccaccaaaacgcgtcatccgcgtggttttatgcaaggaaggtatctggaaagccagcgtgatgtcgaagccacagataagccgtttgagttctttatgaatcgcttccgtctgctggaggccgcgccgcgcgtggagtttattgcgtataccgggctttgcgaagatgtgattcgcccacagttagacgaggcgattgcccagggttatctcaccgaatgtgcggattactggcagataacggaacatgggaagctgtttttaaatagcctgctggagctttttctggctgagtaaacttgtattgccggatgcggcgtgaacgccttatccagccgacatgtggcagcggttgtaggtctgataagacgcgcaagcgtcgcatcagacgttgattgccggatgcggggtcaacgccgcatcctgctacaaatcgtgcactatatcaaacttacttaatcaccccattgcgccgcagttgttcggtatcttttttccagcgttcattagcttggttgatatcgtcaattttcatcaaaatcgcgacttttttactgtttatttcactaactttcatcgttaacggatattgccctttttcgagcgttacccagtcatcctgcaatttacggctaagtttttgactttgcagaaaagtctgtcgccgttgttcgttgatatcgaaatctcgtttctgctgaatcggcacttcataacactcttcactctgtttatgacatgccgcaatcgccggttgataaacctctttgtcatatttaaccgcgaacgcctcgctatcgttctgtttattaaactcatcacgctgttggtgaatttttttaaaggcgtcttcgcgggtcatttgcttaccgtttgcatcttttccccaatatgcatccgctgctttctgcgccgccaccatttgcttatcaagcgctttcacttccttttccagcgcaggaatgctgttcttctgggtattcaacgcagattcaagctgactaaagcgataattgaaatcttcgctattcacgatcagatatttattattcgttttgatatcgtcgaccacccgcccacgatcgctggctgccgcctgaaaagagtaaaagttcacgctccagccagacgcgggcgttcctttactggttaacatcgcgctgaattttaccggtttatctttcgtccaggtctgttcgagcagttcgtaatctgccaactgaccgacccaggtatagagatcgtcactggaagagacatcgccttccgcactccaggtggcctgattacccttagcatcaagattttttaaggtgatagcatcaagcttgagaatgccgtgatactgctttttgaattgatcttttaagatattttcagttggcggttcgccatctgcccaggcattaccagtcatcaacataagcagtgccgtgccaacaatccattgctttttcacccgaaaaacctcacgcggaataatttattccggtgattatcattagggtaattaaaattggcaatggacgtgagtctgaagtgaaaaagccccggcacgataccggggcgaggcgattagtactgattgaagatctgctggatctgctgcggatctttggtttgcgtcagagccagttgcagcagaacgcgcgctttttgcgggttcagcgtgccagaggcgacgaagccgtatttcgcatcatccacttcggcatcctgagtggtagcgcccgtcggtacgcgggaagaacgcacgactgcagtaccggttttcgcggcggtcgccagcgtgtcgaacacagatttatacaggttgccgttacccacaccagcgctaacgatgccatcatagcccgcatctaccagtgctttagccggaagatcggatgcgttagcgtagttataaacaatgccgactttcggcagttcattcagcttagagacatcgaatggcgtgtcgctggtatgcttacgtgccggggtacgctggtagtcaatcttaccgttgtgaatgtaacccagaggaccgtagttaacagacttgaaggtcgctacgtcggtggtgttggttttggtgacgtcacggccatcaagcacggtgtcattcatcactaccagcacgccacggttggcggaggctttatcagctgcggtcactaccgcgttatacaggttgaatggaccgtctgcgctcatagacgtggacggacgcattgcgccgaccatcaccaccggtttgtcgcatttcaccgtcaggtcgaggaagtaagcagtttcttccatcgtgtcggtaccgtgggtaatgacgaagccgtcggtcttatcgcagtcggtgttaatttttttcgccagtgtcagccagacattatcgttcatgtcctgggagccgatattcactacctgctcgcctttaacgttcgcaatgtcttttagttgcggcaccgcattaaccagattttctacgccaactttacccactgtgtagttagatttggttgcggagtcaccaccaccggcaatggtcccgccggttgctaaaatggtgatattgggtaatgccaatgctgcaccactaaaacccataaccagtgcggcaagtgccgtctttttgaaaaactccatttcattcctccagttacgtgaacgctacgcattatcccttagctctgtatgggaaatttgacgttaaacaatttacaacgtgaatatattttggagatctacaaagttagaggcaggtaacaaaacgaagaattaaacggcataaaaaagtattatgccgtcttaaaatagaggattattttaaattcccgaccagggctttgcggctatcttccagagtcacaacgcggctacaaacatctttgccaaactgctggaaatctttttcctgctttttccactcggtttggatactggattgcagcccccccaggcttcccagcacattctgtaatgggttaccgccgctttttcagcaccgctttcgcgcccatttcattaatgctgtcctgtaaaattccacccattgcctgattcactaattgctggccttcggcgcgaacctgatcaatggctttatagtgaaacgtcaggccatcgctgcgcgtttcaataatgcggttcatctgctctttcagctgcgcatcaagtttggtcagacggctgcgcattttgctgctttcgcccatctcctgaacgataattttatccagagcaatacgggctttctcgacgcggcttttcgcgccttcatcaatccacggcagcgtgctgcgtagttcagcctgataatccttcgcctgctcgcgctgggcggcattcagggaatattgcttaccgttatacatcacgttgccgtctggcgtgatcaccagattgccgttttcgcccttcacctgcacggtttgcgggctgacaatcacatcgtcacgcggcgtgacgctgcactggtagtcggcgtgagcggtcattgccgtcacactaagtgctgccgccagcagcattttgcgcatcatagtcttccctcaagaaaaaatcaggccagcatttgctggccccagattgataacaaagtacgcgttttccatgccggatgcggcgtaaacaccttatcccgcctactcgatcgtgcatctttccaggcctgataagcgtagcgcatcaggcagttttgcatttgtcatcgcccgtatgctttcttagtcccaccaaacgtcgaaaagttcgctggtgcgtacctcatccagtttgcgctcttccagccacttacgcacaatcgcctgatgttcttcggtgcatttgccgatttcctgcatgcagatcagaccttcccaggccagataaccgctgccgtcaaaggccagtttgttcggttcgataacctcgttaataaaatcatcaacggttttatcaatctgttcttcgcttgtaccttccgggaatcgccatgccacgctaaatcctaattcctggaattcgtcgatgtgcatttttttacgcagacgacggctacggttctttgccattatttcaccctctcgaacattaagtcccatactccgtgaccaagacgatgaccacgttgttcaaatttcgtcaccggacgacttgccggacgcggtacgtaatcattgctctcactcaggtttttataaccgtcaatagaagacatcacttcaagcatatgttccgcataaggttcccagtcggtcgccatatggaatacgccccccagctgcagtttgctttttaccagttcggcaaacggcacctgaacgatacggcgtttattatggcgcgctttgtgccacgggtcagggaaaaagagctgcaccatgcgcaaactattgtcaggaatcattttatgcagcacttcaaccgcatcgtgacacatcacgcgcaggttgcttaaaccttcttcatgcgcagaagccaggcacgcaccaacgcccggactatgcacttcaatgccgaggaagtcctgctcagggcgatctttagccattgccaccaggctcgcccccatgccaaaaccaatctcaagcgtcaccggcgcttcacggccaaaaagcgcggggaaatccagcatatcttcgctgaactcaacgcccatcaccggccagtagttttccagcgcatgttcctggcctttggtcagtcgcccctggcggcgcacaaaactacggatacggcgcagtgggcggccgttttcatcaaattccggactaatgacgtcgtttttcataaaggtttagtcgcttgtgaaagtgttctgaaaacgggcattatccaaagttagttgccggatgcaagcatgataaggccgtggctgcggaaagttccggtttacaccctgccgtcgctgtgctgcaatcttgcccccaacaacagtgaattcggtgaccatgcaagcgagccaatttagtgcccaggttctggactggtacgataaatacgggcgaaaaactctgccctggcaaattgacaagacgccctacaaagtatggctcagtgaagtgatgttgcaacaaactcaggttgcgaccgttatcccctattttgaacgctttatggcgcgcttcccgacggtgaccgatctcgccaatgcgccgctcgacgaagttctccacttgtggaccgggcttggctattacgcccgcgcgcgcaatctgcataaagcggcacaacaagtggcgaccttacacggcggtaaattcccggaaacctttgaggaagttgcagcactgccgggcgtcgggcgttccaccgcaggcgcgattctcagcctttctctgggtaagcactttccgattctcgacggtaacgtcaaacgcgtgctggcgcgctgctatgctgtaagcggctggcctgggaaaaaagaggtcgagaataaattatggagtttgagcgagcaggtgacgcccgcggttggcgtggaacggtttaatcaggcgatgatggatttgggtgcgatgatttgtacgcgcagcaaaccgaaatgtagcctctgtccgctacaaaacggatgtattgccgccgccaacaatagctgggcgctttatccgggcaaaaaaccgaaacagacgctgccggagcgcaccggctactttttgctattacagcacgaagatgaagtattgctggcgcagcgtccgccgagcggattgtggggcggtttatactgtttcccgcagtttgccgacgaagaaagtttgcggcagtggctggcgcaacggcagattgctgccgataacctgacgcaactgaccgcgtttcggcataccttcagccatttccacttagatattgtgcctatgtggcttcccgtgagcagtttcaccggctgcatggatgaaggcaatgcgctctggtataacttagcgcaaccgccgagtgttggcctagcggctcccgtggagcgtttgttacagcagttacgcactggcgcgccggtttaacgcgtgagtcgataaagaggatgatttatgagcagaacgattttttgtactttcctgcaacgtgaagcagaaggtcaggattttcagctgtaccccggcgagctgggaaaacgcatctataacgagatctccaaagaagcctgggcgcagtggcagcacaagcaaaccatgctgattaatgaaaagaaactcaacatgatgaatgccgagcaccgcaagctgcttgagcaggagatggtcaacttcctgttcgagggtaaagaggtgcatatcgagggctatacgccggaagataaaaaataaaaacagtgccggagcacgcctccggcaacttgcataaaaacaaacacaacacgcacccggaatgatgaaaaaatatctcgcgctggctttgattgcgccgttgctcatctcctgtagcacgaccaaaaaaggcgatacctataacgaagcctgggtcaaagataccaacggttttgatattctgatggggcaatttgcccacaatattgagaacatctggggcttcaaagaggtggtgatcgctggtcctaaggactacgtgaaatacaccgatcaatatcagacccgcagccacatcaacttcgatgacggtacgattactatcgaaaccatcgccgggacagaacctgccgcgcatttgcgccgggcaattatcaaaacgttattgatgggtgacgatccgagtagcgtcgatctctattccgacgttgatgatattacgattagcaaagaacctttcctttacggtcaggtggtggacaacaccgggcagccgattcgctgggaaggtcgcgcaagcaacttcgcggattatctgctgaaaaaccgtctgaagagccgcagcaacgggctgcgtatcatctacagcgtcaccattaacatggtgccgaaccaccttgataaacgtgcgcacaaatatctcggcatggtccgccaggcgagtcggaaatatggcgttgatgagagcctgattctggcaattatgcagaccgaatcttcctttaacccgtatgcggtcagccgttccgatgcgctgggattaatgcaggtggtacaacatactgccgggaaagatgtgttccgcagccaggggaaatccggcacgccgagccgcagtttcttgtttgatcctgccagcaatattgataccggcaccgcgtatctggcgatgctgaacaatgtttatctcggcggaattgataacccaacaagccggcgttatgccgtcatcaccgcctataacggcggcgcaggcagcgtgctgcgagtctttagcaatgataagattcaggctgccaatattattaacaccatgacgccgggcgatgtttatcagacgctgacgacccgccatccctctgcggaatctcgccgttatctttataaagtgaataccgcgcaaaaatcctaccgccgccgataattccattaaccgcccctgacgatgctcaggggcaaaaatgttatccacatcacaatttcgttttgcaaattgggaatgtttgcaattatttgccacaggtaacaaaaaaccagtccgcgaagttgatagaatcccatcatctcgcacggtcaaatgtgctttttcaaacactcatccgcatcacgatgtgaggaaattaacatgaatcttaagctgcagctgaaaatcctctcttttctgcagttctgtctgtggggaagttggctgacgaccctcggctcctatatgtttgttaccctgaagtttgacggtgcttctattggcgcagtttatagcagtctgggtatcgcagcggtctttatgcctgcgctgctggggattgtggccgacaaatggttaagtgcgaaatgggtatatgccatttgccacaccattggcgctatcacgctgttcatggcggcacaggtcacgacaccggaagcgatgttccttgtgatattgattaacagctttgcttatatgccaacgcttgggttaatcaacaccatctcttactatcgcctgcaaaatgccgggatggatatcgttactgacttcccgccaatccgtatctggggcaccatcggctttatcatggcaatgtgggtggtgagcctgtctggcttcgaattaagccacatgcagctgtatattggcgcagcactttccgccattctggttctgtttaccctgactctgccgcatattccggttgctaaacagcaagcgaatcagagctggacaaccctgctgggcctcgatgcattcgcgctgtttaaaaacaagcgtatggcaatcttctttatcttcagtatgctgctgggcgcggaactgcagattaccaacatgttcggtaataccttcctgcacagcttcgacaaagatccgatgtttgccagcagctttattgtgcagcatgcgagtatcatcatgagcattagccagatctctgaaaccctgttcattctgaccatcccgttcttcttaagccgctacggtattaagaacgtaatgatgatcagtattgtggcgtggatcctgcgttttgcgctgtttgcttacggcgacccgactccgttcggtactgtactgctggtactgagcatgatcgtttacggttgcgcattcgacttcttcaacatctctggtagcgtgtttgtcgaaaaagaagttagcccggcaattcgcgccagtgcacaagggatgttcctgatgatgactaacggcttcggctgtatcctcggcggcatcgtgagcggtaaagttgttgagatgtacacccaaaacggcattaccgactggcagaccgtatggttgattttcgctggttactccgtggttctggccttcgcgttcatggcgatgttcaaatataaacacgttcgtgtcccgacaggcacacagacggttagccactaattacgcaaagaaaaacgggtcgccagaaggtgacccgttttttttattcttacttcaacacataaccgtacaaccgtttcacgccatccgcatcggtttcgctataaacaccttgcagctccgggctaaatcccggcaacaaattcaccccttcttccagtgcaaggaaataacgttgaaccgccccaccccagacttccccgggtaccacgcaaagcacgccaggtggataaggcaacgccccttctgccgcaattcgcccttcggcatcacgaatccgcaccaactccacgtcaccgcgaatataagcgctatgcgcatcctgggggttcatcaccacactcgggaaactctgctggcggaacatcgctttttgtaggtctttgacgtcgaaactgacatacagatcgtgcatctcctgacacaactggcgcagggtgtagtcgcgatagcgcaccggatacttgttataaacgctcggcaacacctcaaccagcgggctgtcatcctcaatatgctgttcaaattgcgccagcatcgccaccagttgtgccagcttctcgtggctttccgccggagttaataaaaacagaatggagttgagatcgcacttctccggcacaatgccgttctcacgcagatagtgcgccagaatcgtcgccggaacgccaaagtcgctatattcgccggtttcggcatcgatacctggtgtagtgagtaacagcttgcacggatcaacaaaatactgatccgcggcatatccttcaaagccgtgccacttcgcccccggctcaaaactgaaaaaacggcggtcgctggctaacacacttgtcggataatcctgccacaatttgccatcaacaacgggcgggataaacgggcggaacagcttacagcgcgcaagaatagccttgcgcgcttcaatccctatctcaacacactcagcccacagccgacgcccactctccccttcatgaattttggcgttaacatccagtgcagcaaacagcggatagaaagggctggtagaagcatggagcataaaggcgttattcaaccgcttatgcgggcaaaaacgcgcctgtccgcggatatggttatcttttttatggatctggctcgtctgactgaatcccgcctgctgtttgtgcacgctctgagtcacaaagatccccggatcgttttcgttaagttctaacagcagcgggctgctatccgccatcatcgggataaattgttcataaccgacccacgcggaatcaaacagaatgtaatcacacagatgcccaacggtatcgatcacctgacgggcgttatagacagtgccgtcataggttcccagctgaataatcgccaggcgatacgggcgcggcaggtcggctttttctggcgcaacgtcgcgaatttgctggcgcagatactcttcattaaaacagtgcgcatcaataccgccaatgaaaccaaacgggttgcgactagcttccagatagaccggcgtcgcccccgcctgaatcagcgcgccgtgatgattgctcttatggttgttacggtcgaagagcaccagatcgccacgcgttaacagcgcattcgtcaccactttattcgctgcgcttgtgccgttcagcacaaaataggttttatcggcatgaaagactttggctgcgaatttctgcgcatctttcgcgcttccttcatgaataagcagatcgcccaattttacgtcagcgttacacatatcggcgcgaaagacgttctcaccaaagaaatcgtaaaaatggcgtccggcaggatgctttttaaaaaacgcaccatgttgatgtccagggcaagcaaaggtgctgttgcccatctcaacgtactgcgtcagcgtgtcataaaacggtggcagcaaattctcttcatactgacaggctgcggattccagctccagccactgctgctcgttgccgttgattaccgccgtaacgcccgcaggtaattcaacagcatgttcggaatacaaaaacaccggtagatgaaaaccggtgcgcttaagcaacgcaagaatgccactgcgactatccgcagcggtaatgacgactgccgcgacgtccgtaaaatcagtatctcccaacgccaccacgcgacgatgagaagaaagtcgggataccagttcactactggcggcaatattcatacttttcataagcgcaaacccgtttcggggaagtaagaataccggacaaggtggaaaaccctgccccatgagatatgggtcaaactggtcaccagctccgaccgccagacatcagtaaaagcagaaacgctctgattttactgttgtcctgcagtgagcgtgcgttaacttcaccgcatgagcagtaacatagaaagggaaacgtttcgcgcgaaacggcgataagcgagagaatgtaaggagatggcgtgcatcgggcaaactccgtacagagaggagaaaattcgcgcaatcatggcacctttcgctaaagcgtgcaagccaggactttgcgaacaaacaagccatcgacggcaccaaacggtcataataagaaaatcaaacaatacagctaacaggaactcttgtggtcatcggcccttttatcaacgctagtgcagtcttactgggtggcgttctcggcgcactgctcagccaacgcttaccggaacgtatccgcgtctccatgacaagtatttttggtctggcaagcctggggattggtattttactggtggtgaaatgtgccaaccttccagcgatggttttagctacgctacttggcgctctaattggcgaaatttgtttgctggagaaaggtgtcaatacagcagtcgccaaagcacaaaatctgtttcgtcacagtcgtaagaagccagcgcatgaatcttttattcagaattatgtcgcgattattgtcctgttttgcgccagcggcaccgggatcttcggggcgatgaacgaagggatgaccggcgatccgagtattttaatcgccaagagttttcttgatttctttacggcgatgatcttcgcctgcagcctgggtattgcggtaagcgtgattagtatcccattactgatcatccagttaacgctggcgtgggctgccgcgctgattttaccgctgaccacaccgagcatgatggcagacttcagcgccgtaggcggtttattgctgctggcaaccggattacgcatctgtggcattaaaatgttcccggtggtcaacatgcttccagcactccttctggcaatgccgctttccgccgcctggaccgcctggtttgcctgacaatgcgtgcaatatcggcaaagtgatgatagattgtgcagtctgcagtaaattgaagaaatttgattgacgagacgaggcgaatcaggtttaatgcgccccgttgcccggatagctcagtcggtagagcaggggattgaaaatccccgtgtccttggttcgattccgagtccgggcaccactaattcttaagaacccgcccacaaggcgggtttttgcttttggatctgacaataaccttcacgaaaaaaattagcttataaagtctgggggaattactctcgccacgttaacgagagtaattttattgatattaatctcctgatactttacccccgtccaaactccagccgctgcacattcaccatcccaggcttctcagcagcactgacatcaatttgtgtcacccgcagcgcatagaacgccattttgaatttacgaacggacgcattatcagtgactttaacggcatgggcaaagtgaaatatcattttttaacgataaaaagagtgttatttcttgtgtatcagacaataagcattcattcaaaacctttagaaataatcaaaacacaggtattccactggttaatatattcacatatgaaatgaataaatattggaatatataaatattgaatattttgattaatccccgtactgattattcttcataatcagtacggggttgctacaacatgtattactttttcaccacaattaacggttcaatatcactctcttttttgatgaccagactttcatcaccgcgcaaacacgtcccaccgtagttgccgccaacggtgaaggtacatacctgaatgtatttaccgtccactttcggcaaacaccacagttgctgatagatgtttttctgctcggcaaatttaccgctggttttgtccagcacctcttcatgatggctgacgaggtcgatattgctgccacagcgaccggcgatcggtttcactgcgtaacctgttttcaccagttcatcattaacagtgaaatcggtatccagcaggtaacgatggtgcgggaacaggctccagaggatcggcagaatcgctttgttgccggggatcaccgtccacagcggctcaaagaccagcacttccgggcgcagcaatacgtcgataagacgcacttcgttttgcggatgaccggtacggattggcaccgcagcaaactcacggtcgctaacttcacgaatctgatcaaacgcggtttcccacgcccaggttttccacacgcagttaaccagtcgcccttccccatcaatcagttgcccggcagcatcccagcccagttcatccaatccacgcaagatacgcgtttcaaagcccgcctggtgcagcgcctgctccataaactgcgcgtgatagttttcctcgatatctttgtcctgcatgatatggacaaacggacgtgcacgactgtgtttccaggcaccagccaattcgttaatcagcccttccgccggattgaagccgttgcctttatagccctgctccgcccaacgttcgaggatcaagcccgcttcggtatgacaggaggcggagtcggcgttgtactcgtaaaccttcaggccacgctcatccatgcagaaatccatacgaccagtgatcatatggtgacggcgacgctgccaggagagacgcaaacgtggccagaggattttcgggatgtcgaacagcgccagcaggttgtcatctttcagcaccttgtcggttgcgtgaagatacatcaggtgcagctcgttggtggctttaattagctcctgctcggcactctcggtaatggtgtagtaatgataaggatcctgattgatcacctgaccgttggcctgcacataggcgttttgcagcggatctttttcatccagccatttaccgtcaaactggcctttgttttccaggcgcgctccgctgattttcagcagctcgcctgcaatttccggctgcggtaagctgtattcagtatcttccgtctggatcatccagcccagaatggtggtgtcatcaaaagtgtctttcagggtatagcagccgttttcgaccaccatctccagctcgcgcgtccactgttgcccttgcggcaacggggaatgaatcacgttctgttccgcaatacggactttgttgccatgcaattgggtaatgatggcgacatggccagtgtctttaaattcaccgcctttatcccagataagaagcgcacccgcgaccggcgcacgcgggctgccgttaggaaatgcctgcaatggcaggatgttgtcattaaccacttctcgcaggaagcgcaggctgaaaatctcccacgccatacccacgtcagtaaagaccacaccgtaattcagaaagagaaaacggcgagcaaattcaacgcattgccacttgtggcccatatattcgtcgtcgatatagctacggaatacggcgtcatcttcgtattcctgcggatcgagagaactgtaatcactagagtagattgctaccccacctggggcgtagcccaataatgtcccgaacggggcatcctggctggtcgttcctttgctcatcactttacctttaacaatacaacctaagcagttggcgtaattgttgtgctctgattacctgctcagcgacattaaccggacagaggtcagactaatcatacacctcatcgcagcggctggcgcaaagggttaaaaaattcacattctgtacagcaagtgacctgctacactgcttcaacactaccactcagaaggcaactcactatgacagacaatacttatcagcccgcgaaagtctggacgtgggataaatccgctggcggcgcgttcgccaatatcaatcgcccggtttctggtccgacgcatgaaaaaacgctgcccgttggcaaacacccattgcaactttatagcctgggaacgccgaacggtcagaaagtaacgattatgcttgaggagctgctggcgctgggcgttactggtgcagagtacgacgcctggctgattcgtattggcgatggcgatcaattctccagcggctttgtcgaagtgaacccaaacagcaagatcccggcgctgcgcgatcatacgcataatccgccgatccgcgtgtttgaatctggtagcatcctgctttatctggcggagaaatttggctacttcctgccgcaggatttggcaaagcgtactgaaacgatgaactggctgttctggttacagggcgcggcaccgttcctcggcggtggttttggtcacttttaccattacgcaccggtaaagattgagtacgccatcaaccgctttaccatggaagccaaacgtctgctcgacgtgctggataagcaactggcgcagcataagtttgttgcgggcgatgagtacaccattgcggatatggcgatttggccgtggtttggcaacgtggtgttaggtggtgtgtatgatgccgctgagtttcttgatgcgggcagttataagcatgtacaacgctgggcgaaagaagtaggcgaacgtccggcggtgaaacgtgggcgtattgttaaccgcaccaacggaccgctgaatgagcagttgcatgagcgccatgacgccagtgatttcgagacgaatacggaagataagcgtcaggggtaagggttggtgttcgtcgcagcaagccatccaggccggataaggcgttcacgccgcatccggcaatcgtgcacaatgcctgatgcgacgctgccgcgtcttatcaggcctacgaaagctaatcatcacgcgctggtaatgtcgtaatccatttggcgcagtgcgtctaatgtggctttggcttcatcttcgtcgatgatgctcatggcaaatccgacgtgtaccagcacccactggcccagtagatcggcagggttaccttcacaaatcagggcgatattcacatcgcgcttgataccacatacttcaacctgcgcaagctggtgaatatcttcaccgacagccagcacctggcctggaacgccaatacacattattaactccggttattcaacttcaatacttttgacgatcaggctatcgccggtatcgacacgcaaccgctcgccgtgacagagcggacactgcgcatcgtgctgatgaatctccaccacctggctgcaatcccagcaccaagcctgggcgggtttatagacgatatgtaaatcgcacccttgcgccaccgttccgtggcagacaatttcaaaactaaaacggacggcgctctcctcaacgcaggagagcgcgccaatttccagccacacggcggtgacgcgcttaacatcgtgctgctccgcctgccgttggataatttcaacggcgctctggcaaagagacaactcatgcattttcgccactcctgcgaccaaacagcagggcgcgacgccctgcgtgtggtacatccggattcgtgactggcaggctaaggatcattcgtgcgcagtcatccgtcaggcgttggccctcttcaatgctcatgctgtggctaagcgggctcatcaggctacaggagagatattggctaacaccgtccagttcgccaacggtaaaggtcatagtgccatacggcagttgcagaccaattttttcactcactttgcgcagcggccagagttgatccgggccggggaagataactgcactcagcatccacggggtgatcacacaccccgtccactgaccttcgaacagcgtaaaatcagaaacatacaccggcatactaggatgcagaaaagagagatcgtgcatgctacgccgggcaatttcttcaaacactgcctgtacttgcgccttcggggaggtctggaaacctgctatctcttcagtcatgaatcgcctcccgtgggatggcttccacgccagattcacgcagcgcagccagaacctgctcaagcgcaggttcaatcattgcttcaaccgtcggcgttaagccgatgtgtggctccaggctttccgggatcacgccgaccagggtcagctttttcggaaactcgccggtgaagcgcagggcgctcaagacgtcggccaggccaagctgatgcggagagattttgttggtaaacaacgccggaacttcttcatcccgcaggatcatcatcgttcccggcgcgttctttttgctgacaatggcatccgcaataatcaaatgatcgcgatttgccatgtcgccaagcagctccattcccgccgtgccgccatcgaggatctcaacataatccggcagaatgtatcgttgctctaacgcttcgacaatccgcacaccgatggcttcatcggtcagcaaaatattgccgacccctaagactaaaatacgcattacagaaccttcacactaaccacttcgttgccgtcagcatccactacgtgtaccgcacaggccatgcacgggtcaaaggagtgaatggtacgcaccacttccagcggtttattcggatcggcaaccggtgtacccaccaggctctgctcgtaaggaccgacgtcatcattgaagttacgcggaccagagttccaggtacttggaacaaccgcctggtagttgctgatgataccgtctttaataaccatccagtgagagagcataccgcgcggcgcttcgaggaagccaacacctttgaattcacccgttgccggaatgttcggcttcacaaaggtggtgtgatcgcctttgccgatattggtgatcagtgcactgtattggttttgcaggatatcctgcaattcacagcagtgaacggtacgaccaataatacggcccagcgtggagtgcagctgtgccacttccagcgtgttgccagtcagtttctgataaatcgcaacgatttcattcagtttgttctgggtagattcgcgacctgccgccagtttcaccagcatattagccagtggccccacttctaccgttttgccgtagaaagtcggacttttcacccaggaatatttcccgtcgtcagaccaaccatcataagccggaatggtggtgccttcccacggtgcctgcggcgcttcgtctttataccaggagtgcttcgcgctttcctgaatgcctttgatcaggtattcatcggaatgagaagtgatcggacgatagctggacagatccgcattctcaatgtagccgcccgggaacaggaagctgccgtttttactgtcggtcgggaattccggcacgctcaggtagttcaccgcacctttaccgcgtgtcagccattccgggtagaacgcggcaataactgcggtatcaaccttataaacctgctcaacaaagtcgctcagtttgtcgatgaaagacttgatgtacatcaggcgctcaaggttcagcacgcccaaaccgtcgaggttgatcgggttcgcgacaccacctaccgccaggttctgaatgtgcggcgttttaccgcccagcagcgccacgacgcggttagcgtcacgctggcactccaacgcttgcaggtagtgcgctaccgcaatcaggttcacttccggcggcagtttcatcgccggatgaccccagtagccattagcgaaaatacccaactgaccgctggcaaccagatctttgatcttgttctgaactttggtgaactcttccggactgttcaggtgccaggtgctaacgcctttcagcatttcggaggctttggttgggtcagcttgcagtgcagaagtgatgtccacccagtccagcgcgctaagctgatagaaatgaacaatatggtcatgcgtggtgtgcgcagccagaatgatgttacggatgtattgcgcgttaaccggaacgtcgatattcagcgcactttctgccgcacgaacggaagacagcgcgtgagtggtagtacatacgccacagatacgttgcacaatcatccatgcatcgcgcggatcgcggtttttcacgatctcttccatgccgcgccacatggtaccggaagcccatgctttgctaacgacgccattttcgatttcgcaatcgatgcgtaaatgcccctcaatacgggttaccggatcaatagtaattctctggctcatgctttgctcgcctcatgacgattatgatcgttttgttttaaaggaggaagtatcggcagtagacgaatgagtacgatgtaagcgcaaatctcaatagccacaaaaccaatagaaatcaacagttcttcccaggtcgggaagtaggcgtaaccgccgcccgggttgaatgccaccaggctataggtcagacgccaggttgcacaacctaacagtgcgctcagtgcactcaggaacagcatgcgggaatcattacgcagcttcgccacacgcagaacgaccagcgggaagagcatcagcaggacttcaatccagaacatcacggagtagaagtcaccggcaaacgctaagctcagcttgtcgcgatagataagctcgccaaagcgcagcacgatgaaaatcgccagcaacacactgatggtgttggtcagcttaacaaacagactcttttcatccggaccgttgccacgcagacccgcctgcaccaggctaccttcaaagatgacaatgctgaagcccatgatgaacgccgtcagcaggctgaacagcggcaacatttcatagctctgccacaacggatgcaccttgtagcccgcgctgatcatcaggctccccatactagactggtgcatggtcggcagcagcgcaccgagcgcgatgatgaagaacatcaccttgtttagtcgctgtaggctcaccttccaccccagacgttcaaacagtgccggagcaaactccagtgccatcacgccgatatagatggtcatacagaccgccgtctcgaacagtacgctgttcacgttgaagtgacccggaatgtagaagtacggcaggttccagtagcgacccacgtcgatagtgatgctcaagccacccagactgtaaccaaacagactcgccaacagcgccggacgcaccagcggatggtattgcccacggttaaagacgtataccgcccacgccagcgcccagccgccacaggcaaagccggtgccaatcagcaggtcaaacgcgatccacacgccccacgggaagccgccgttcaggtcagagacagagcccagaccgaacaccagacgcttcacaatcaggagcatacagatgacgattaacggtccaaaaatcatgaccggtttactgatgattttgccgcccagcggttgtggatcatgactcatgatcgtctcctccgtcgtgattattcaactctcatgatcgtctcctccgtcgtgatggtcgtttttggtgttgcgacgaaccagcacggttaagcccgccagcacagccagtggtagcatcatgcctttatacagggtgtgttgaatattttcggaacgcgcaccggtagaaagatcgtccagtttcggcaggtcgagattttcataaggcacacccgtcagtaccagaacctgagtaccgccgccctctttctcgccgtacagatgcggataatatttcggcaccgtatgcaggtaagtgtcgccagatttcagcgtctgacgcggatagtggtattcgctgccaggcttcagcgccagacgttttttcgcctccgccatcagctcttcacgcgtaccgaaaatcaccgcgcccgccgggcacacttctacgcagccaggtagaccgcctttatcgagacgttccacacctttctggttgcacagctcgcacttatgcagcgcaccaaacgggttgttgtagtcgtacttcggcacgttgtacggacaggcgaccatgcagtaacggcagccggtgcacacatctttgtcgtaatggacaatgccggttttcggatcttttttcagtgcagagaccgggcacacagagacacagttcggatcgacgcagtgcatacactgtttcttaatgtacgcgtagccgttctcctcctggtctttgttgacccctgtgccgctggtccacacctgaatgatgttattggtatacgggctcagtttgtcgttgttgctccaggtctgttccccttgcgggttacgttcagggaaattgatatcctgacacttggtgacgcaagcctggcagcctacgcacaaggtgctgtcgtacaacatccccaggcttcccggaattggcgggcggttttcagcagccgcatgactgacagacggcagcgcgcccgtcagcaatgccccgcaggaggctgctttaataaaattacgtctgttcacggttattctccccgactgtcagcgttatctttcttttgctgacgacccagttcacgcaccgccatcacgctgacaccggcaaccaacccaaccacaccgccgagcaaaccaatagcgcctgcagagacgttgccgccctctttagcgttaacatccggtttctgactacgcggagtttgattttcgacgttggcaagctgatggatgcctttatggaagccgataccttcttcgttacagccatagcaagggtgaccaatcgccaccggccacacaccgccaacatcgcagaattgcagcgtactgcagttgccgtaagtttctggccctttacagccgaggtggtacaggcaccagccttcgcggtggccttcatcaccgaactctttggcaaaacgaccagcatcgaagtgcgggcgacgttcgcagtgttcgtgaatcagacggccataggcgaaggtcggacggtttttgtcatccagtttcggcggtttgccgtaagtgatgatgtgcgcaacggtcgcgaggaagttgtgcgggttcggcgggcagcccggaatattgataacggttttgcctggcagaacttcttgcaggctgactgcgccagttgggttaactccagctgcggcaacaccgccccacgcagagcaggaaccgatagcgataatggctgctgcgccttccgccgctttgcggatgtgatccacaatcggctcaccggcaaccatgcaataaataccgttatcttttaatgggatggaaccatccaccactaacacatactgccctttgtacttctcgagagcgttatgtttgttctcttcgacctgatgaccgaaggcggcggaaagcacttcgtgatactccagagagatagtctccagtacgaggttttctaccgttggatgcgttgcacgaagcagagattccgtacaaccggtgcactcctgcgcgccaatccagataactggcggacgctgcgggttagtaacgctttcggccatctctgcagcggctttgctacttaaccccatggtggcggctaatgctgcacaaagcttcatgaaatcacgacggttaatgccgtgagaatggatgagggtgttatctccagtcatttatagttattccgttgcgaagacctggcatatattttgcctcaatcgcaaaatcaataatgcgatcgatgcgccatttaccacacatttattatggttatcgatatcatgatactgcggcggggcgctaaaacgaagggaagaagcattagtgtaattaattaaagcaagataatacgtatgtttgatcaattttcgaggcgataaccggccataaaaaagcgcaacgtagaacaggaattattctcacgaaagaaatccattaccatctctttatccagtccatagcggcgcgtcagaatacccgcttcccaggcgctaagctggcgatctccggtcttttcgtacatccggtgactgtagcctaatacaaaaccgcgtttataatcggcacagaattttgtcacattaaccgcactgtcggcatgcgttgcttttaatcccgccattaagcctttaccaaaatggttattcatcgttcacctcattcgctatatattgtcatatatagcgatattttaggcaaagaacgacttttgcgcacgctattttttcatgcttgtttaagacgtaatcccgtaagagataaacctatcaggagagatatttatcgaaccatttcagtgtcctttgccaggcaagatcggcggcagatttgtcataacggggcgtggaatcattatggaatccgtgattaacccccggatagatatacgcctcataaaccttattattggctttcaacgccgcctcgtaagcaggccagccctcgttgattcgggtgtccagttccgcgaagtggagtagtaaaggcgcttcaatcttcgccacatcggcagtgggtgcctgacgaccataaaacggcaccgcgcaggccagttccggatacgcgacagccgccgcgttgcttacgccaccgccatagcaaaatccggtaatacccactttgcctgtcgcttgcggatagcgttgcataaactcaattgcggcaaagaaatcattcatcagtttgttggatcaacctgctgttgcagctcacgacctttatcatcatttcccggataacctccaacggaacttaagccgtcaggtgccagggcgatataccccgccttcgccactcgccgtgccacatcttcgatatacggattcagtccacgattctcatgcaccaccactacggctggcgttttgccgctcatctttgcgggcttcaccagataaccccgcacctcgccgtgaccatttgggctaggatacgtgatgtactcagcaacaatttccgggtcggtaaactctacctgagtcgccagcgcataatttggcttgagcaaatcaaacaacgctaatgccgtcatcccgcctaccgcacttcgccgcaaggttgaggaactcacgtttcgagattttcccgtgagcgtaatagtcatagtaatccagcaactcttgtgggaaatctttggcggttaaacgcggcatcgttgcactcctcagttggtgtttttttaagcaaagcataagcacgtatttttgcccagtttttcgtcactctgtgagccagactacgggatacgcgctggcgaatcgctaaactagaaacattgtttcgaaattgaacggtggaaaggagaggtcatggtctggttagcgaatcccgaacgttacgggcagatgcaataccgctattgcggaaaaagtggtttacgcctgcccgcgttaagcctcggtttatggcacaatttcggtcacgttaacgcgctggaaagtcagcgtgcgatcctgcgtaaagcgtttgatttgggcattacgcactttgatttagccaacaattacgggccgcctccaggaagcgcagaagagaactttggtcgcctgctgcgggaggattttgccgcttatcgcgatgaactgattatctctaccaaggctggctacgatatgtggcccggcccttacggctctggcggtagtcgtaaatacctgctcgccagcctcgaccaaagcctgaagcgtatggggcttgagtatgtcgatatcttttactctcatcgcgtcgatgaaaatacgccgatggaagaaaccgcctctgcgctggctcatgcggtacaaagcggtaaggcgctgtatgtcgggatctcctcttacagcccagagcggacgcaaaaaatggtcgagttgctgcgcgagtggaaaattccgctgttaattcatcaacctagctacaatttactgaaccgctgggtggataaaagcggcctgctggataccctgcaaaataacggcgtgggctgtattgcctttactcctctggctcagggattgctgaccggaaaatatctcaacggcattccgcaagatagtcggatgcatcgtgaagggaataaagttcgtggtctgacaccgaaaatgcttaccgaagccaacctcaacagcctgcgcttattgaatgaaatggcacagcagcgtggacaaagtatggcgcaaatggcgttaagctggttgctgaaagatgatcgcgtgacgagcgtattgattggtgccagccgcgcggagcaactagaggagaacgtgcaggcgctgaataatctgacatttagcaccaaggagctggcgcagattgatcagcatatcgccgatggcgagctgaatctgtggcaggcgtcttccgataaatgacctgttaataacgggcgcgcgaaccgcgcccgaatcagatcagtgattatgacgagtcagtcggtcaagatagcccatcacaaatgcagaaagcacaaacgtcagatggataatgacgtaccacatcagtttgttatccgggacatttttcgcatccataaagacgcgcagtaagtgaatggaagaaattgccacaatgctcgctgctactttgtttttcaggctcgttgcgtccattttccccagccagttcagcttctctttgttctcggagatatccagctgactgacgaaattctcataaccggaaaacatcaccatcaccagcaaaccgccaaccagcgtcatatccaccaggctcagcaacacgaggatcaaatcactttccgccatgctgaagatattcggcagtacgtgaataatctcctggaagaacttcagcgccagggcaactaacgccaggctaaggccaaagtacacgggggcaagcagccagcgagaagcatacattgcattttcaagaaaacgttccatacattcctgtcgtgtagttaaaacgggcaacagtatatcgcaattgagtaaacagcacgcaacagcaaatcaacatatacgttaaacctttgtcgcataattctgaggtttagggatcttcctggttcccttatcaacgcatcgagaacgtctacccttaaaggacgttgaacctgaagggagaaaaacgatgtctcatttaaaagacccgaccacgcagtattacactggtgaatatcccaaacagaaacaaccgacgccaggcatccaggcgaagatgacaccggtaccggattgcggcgagaaaacctatgttggtagcggtcgcctgaaagatcgtaaagcactggtgacagggggcgattccggaataggtcgcgctgccgccatcgcttacgcgcgtgaaggggctgacgtggcgatcagttatcttcccgtggaagaagaagacgctcaggatgtgaaaaagatcattgaagaatgcggacgcaaagccgttctgctgccaggcgatttaagcgatgagaaatttgcccgtagcctggttcacgaagcgcacaaggcgttaggcgggctggatattatggcgctggtcgccgggaaacaggttgccattccggatattgcagacctcaccagcgaacagtttcaaaagacctttgccattaacgttttcgcgctgttctggctaacccaggaagcgatccccctgctaccgaaaggtgcaagtatcatcaccactagcagtatccaggcataccagccaagtccgcatttactggactatgcggctacgaaggcggcgattctgaactacagccgtggcttggcaaaacaggtcgcggagaaaggtattcgggtgaatattgtcgcgccaggcccgatctggacagcactgcaaatttccggcggacaaacgcaggataagatcccgcagtttggtcagcaaacgccgatgaaacgtgcggggcaaccggcggaactggcccctgtatatgtttatctggcaagtcaggagagcagctacgtcaccgcagaagtgcacggcgtgtgcggcggcgagcatttaggttaaaaaaatgcccggttgtgaaaagcaaccgggcatcattgtgaattcactcttacctgatgtggcgaaaacgccttatccgcctacaaacgcatgaagattcaacatgttgcaatagattttgtaggcctgataagcgtagcgcatcaggcattgagcacctaatgccggatgcgtcgtgaacgccttatccggcctacaaacgcacgaagattcaacatgttgcaatagattttgtaggcctgatgagcgtagcgcatcaggcaattctactttacttcgctttggcggtttcttcgccgaccagacctatcttcaggtaacccgcctgatgcagcgtatccattaccttcatcaacgtctcgtaatcgacggttttgtccgctcggaagaagatggtggtgtctttcttgccttcggttaacgcattcaacgccgtaatcattgtttcatcggtgaccggatcgttaccgataaacatgctgttgtctgccttcacgctcagataaaccggtttttccgggcgcggctgcggcgtgctggtagaagcaggcaagttcaccttcacatctaccgtcgctaacggtgccgccaccataaagataatcagcagaaccaacatcacgtcgataaacggcgtcacgttgatatcatgcatttcgccgttatcgtcgaggttttcgttaagatgcattgccatcggatattatcctgcgcgtaatttttgtgcgacacgaaccggatgcgcagcggcgctggcttccagatccaggtcacggctttgcagcaacaatacctgcgctgcaacatcacccagcatcgctttaaagccgccaatctggcgtgcaaatacgttatagataacgaccgcaggaatcgctgccacgaggccgattgccgttgctaacagagcttctgcgatacccggcgcaacgactgccaggttagtggtctgcgtttgcgcgataccaataaagctgttcatgatgccccagaccgtaccaaacagaccaacgaacggagaaatcgcgccgatggttgccagatagccgttaccgcggcccatttgacgacccactgcggcgacccgacgctccagacggaagctggtacgttctttaataccttcgttatcgtcgctgccttcactcagttccagctcattctgcgcttcattgagcaaatgcaggcttaagcttttgctaccaaaatcagcggcgatatcgttggcctggtttaaggaacgcgcttcagccagcagttgctgctcgcgcttaaggcgacgcttctgattgaagaactctacgctcttactgaagaagattgcccaggtgactacggaggccaaaataagcccaatcatcacgcacttaacgacaatatcggcgtgctgatacataccccagacggaaaggtccgtctgcattaaattattacccactgtgtatctccaggacgcaagtcacaaaatctgcgcataataatatcaaaacgacgtcgaattgatagtcgttctcattactatttgcatactgccgtacctttgctttcttttccttgcgtttacgcagtaaaaaagtcaccagcacgccatttgcgaaaattttctgctttatgccaattcttcaggatgcgcccgcgaatattcatgctagtttagacatccagacgtataaaaacaggaatcccgacatggcggacaaaaagcttgatactcaactggtgaatgcaggacgcagcaaaaaatacactctcggcgcggtaaatagcgtgattcagcgcgcttctagcctggtctttgacagtgtagaagccaaaaaacacgcgacacgtaatcgcgccaatggagagttgttctatggacggcgcggaacgttaacccatttctccttacaacaagcgatgtgtgaactggaaggtggcgcaggctgcgtgctatttccctgcggggcggcagcggttgctaattccattcttgcttttatcgaacagggcgatcatgtgttgatgaccaacaccgcctatgaaccgagtcaggatttctgtagcaaaatcctcagcaaactgggcgtaacgacaagttggtttgatccgctgattggtgccgatatcgttaagcatctgcagccaaacactaaaatcgtgtttctggaaagcccaggctccatcaccatggaagtccacgacgttccggcgattgttgccgccgtacgcagtgtggtgccggatgccatcattatgatcgacaacacctgggcagccggtgtgctgtttaaggcgctggattttggcatcgatgtttctattcaagccgccaccaaatatctggttgggcatagtgatgcgatgattggcactgccgtgtgcaatgcccgttgctgggagcagctacgggaaaatgcctatctgatgggccagatggtcgatgccgataccgcctatataaccagccgtggcctgcgcacattaggtgtgcgtttgcgtcaacatcatgaaagcagtctgaaagtggctgaatggctggcagaacatccgcaagttgcgcgagttaaccaccctgctctgcctggcagtaaaggtcacgaattctggaaacgagactttacaggcagcagcgggctattttcctttgtgcttaagaaaaaactcaataatgaagagctggcgaactatctggataacttcagtttattcagcatggcctacagctggggcgggtatgaaagcttgatcctggcaaatcaaccagaacatatcgccgccattcgcccacaaggcgagatcgattttagcgggaccttgattcgcctgcatattggtctggaagatgtcgacgatctgattgccgatctggacgccggttttgcgcgaattgtataacattgccacttttggacaattttgcagacattttattgtgaaaagtcttaaattgttgcgtccgggatcaaggcgtcccggacgattcaggagtacaataggcagataaaggcttaaacgctgttccacaggaaagtccatggctgttattcaagatatcatcgctgcgctctggcaacacgactttgccgcgctggcggatcctcatattgttagcgttgtttactttgtcatgtttgccacgctgtttttagaaaacggcctgctgcccgccagttttttgccaggcgacagcttgttgatactggcaggcgcattgattgcccagggggttatggattttctgcctacgattgcgattctgaccgccgcagcaagtctgggctgctggctaagttatattcaggggcgctggttagggaataccaaaacggtgaaaggctggctggcacagcttcctgctaaatatcaccagcgcgccacctgcatgtttgaccgccacggtctgctggcgctgctggctggacgttttcttgcatttgtccgtacgctgctgccaaccatggcgggaatttccggtctgccaaaccgccgcttccagtttttcaactggttaagtggattgctgtgggtcagcgtggtaaccagttttggctatgccttaagtatgattccgttcgttaaacgccatgaagatcaggtaatgacgttcctgatgatcctgccaattgccttgttaaccgctggcttgttaggcacgctgtttgtggtgattaaaaaaaaatactgtaacgcctgacgattttccccgttcccggttgctgtaccgggaacgtatttaattcccctgcatcgcccgcattcttgccgcatcttcccccggcgtcacaccgaagtaacgtttaaactcacggctaaattggcttgcgctttcatagccgacgcgcatcgctgctgcgctggccttcatgccgtcatggatgatcatcatccgcgccttatgcagacggtaattcttcaaatactgcaacgggctggtactggtgacagacttaaaattatggtggaacgcgcttacgctcatgttggcttctgccgccagttgctcgacgctcaggttttcggtgtatttattctcaatccgtttcagcacgcggctaatcagactgaagtgagtctggcgactgaccagcgccagtaacgcgccgccgcaaggtccggtcagcacgtagtacagaatttcgcggatgatctgtttgccgagaatacgcgcatccagtggtcgctccatcacgtcgagtaaccgctccgccgcgcataaaatctcttcacttaacgtggcggagttaatcccgctggctgccatgctcggctggaaatgctcatcttcgccaatgtccatcaacagttcctgtaactgcaaaatatcgacattgagacgcaaccctgccagcggcacctcactcgtggcataggtttcgcactcaaacggcaacggcaccgtcagcagcaggtattcattggcatcataacgaaacacgcgttcattgatataaccgattttatgcccggaaaagagaattatgatgccaggctcgtacatcaccggtgtacgtgcgaaaggcgtctcgccatacaacaaacgcacatcgggcaacagtccactcaaactattttctttatttttcagtttattaactttatccgccagcaagcggcaaatctcttcacgtttcatatcgcgtaatttcttaggaataatgcggcaattactttgtgcgcaattttgtagcatttctccagcactctggagaaataggcaagacattggcagaaatgagcattgagagccagggcgctggcgatcacaatgaaaaacatcaggcagatcgttctctgccctcatattggcccagcaaagggagcaagtaatgaacaactttaatctgcacaccccaacccgcattctgtttggtaaaggcgcaatcgctggtttacgcgaacaaattcctcacgatgctcgcgtattgattacctacggcggcggcagcgtgaaaaaaaccggcgttctcgatcaagttctggatgccctgaaaggcatggacgtgctggaatttggcggtattgagccaaacccggcttatgaaacgctgatgaacgccgtgaaactggttcgcgaacagaaagtgactttcctgctggcggttggcggcggttctgtactggacggcaccaaatttatcgccgcagcggctaactatccggaaaatatcgatccgtggcacattctgcaaacgggcggtaaagagattaaaagcgccatcccgatgggctgtgtgctgacgctgccagcaaccggtagtgaatccaacgcaggcgcggtgatctcccgtaaaaccacaggcgacaagcaggcgttccattctgcccatgttcagccggtatttgccgtgctcgatccggtttatacctacaccctgccgccgcgtcaggtggctaacggcgtagtggacgcctttgtacacaccgtggaacagtatgttaccaaaccggttgatgccaaaattcaggaccgtttcgcagaaggcattttgctgacgctaatcgaagatggtccgaaagccctgaaagagccagaaaactacgatgtgcgcgccaacgtcatgtgggcggcgactcaggcgctgaacggtttgattggcgctggcgtaccgcaggactgggcaacgcatatgctgggccacgaactgactgcgatgcacggtctggatcacgcgcaaacactggctatcgtcctgcctgcactgtggaatgaaaaacgcgataccaagcgcgctaagctgctgcaatatgctgaacgcgtctggaacatcactgaaggttccgatgatgagcgtattgacgccgcgattgccgcaacccgcaatttctttgagcaattaggcgtgccgacccacctctccgactacggtctggacggcagctccatcccggctttgctgaaaaaactggaagagcacggcatgacccaactgggcgaaaatcatgacattacgttggatgtcagccgccgtatatacgaagccgcccgctaagctttttacgcctcaaactttcgttttcgggcatttcgtccagacttaagttcacaacacctcaccggagcctgctccggtgagttcatataaaggaggaacgtatggctaatccaaccgttattaagctacaggatggcaatgtcatgccccagctgggactgggcgtctggcaagcaagtaatgaggaagtaatcaccgccattcaaaaagcgttagaagtgggttatcgcagcattgataccgccgcggcctacaagaacgaagaaggtgtcggcaaagccctgaaaaatgccagtgtcaacagagaagaactgttcatcaccactaagctgtggaacgacgaccacaagcgcccccgcgaagccctgctcgacagcctgaaaaaactccagcttgattatatcgacctctacttaatgcactggcccgttcccgctatcgaccattatgtcgaagcatggaaaggcatgatcgaattgcaaaaagagggattaatcaaaagcatcggcgtgtgcaacttccagatccatcacctgcaacgcctgattgatgaaactggcgtgacgcctgtgataaaccagatcgaacttcatccgctgatgcaacaacgccagctacacgcctggaacgcgacacacaaaatccagaccgaatcctggagcccattagcgcaaggagggaaaggcgttttcgatcagaaagtcattcgcgatctggcagataaatacggcaaaaccccggcgcagattgttatccgctggcatctggatagcggcctggtggtgatcccgaaaagcgtcacacctagtcgtattgccgaaaactttgatgtctgggatttccgtctcgacaaagacgaactcggcgaaattgcaaaactcgatcagggcaagcgtctcggtcccgatcctgaccagttcggcggctaacatgcaaattctcccggtggcggtaatgttccgctaccggacttttcagaaatcatttattcccctcgcgtcccgcccgttgttactcttccttgttcaggaatgccaaatataaggacatcatcatgcagagccggaagctcttaaaagaacaactcatctatatccgggataaacgcaacggagaggtgaaaaacagatgaaaataatacttctgtttttagcagccctggcaagttttaccgtacacgcacagccccccagtcagaccgtagaacaaacagtccggcatatttatcagaactataaaagtgatgccactgccccttattttggtgaaaccggagagcgggcgataacttctgcgcgtattcaacaggcgcttaccctgaacgacaatcttacgctgccgggcaatattggctggctggattatgatccggtttgtgattgtcaggattttggcgatctggtgctagaaagcgttgcgataacccaaactgacgccgatcatgccgatgccgttgtgcgctttcgtatctttaaagatgataaagaaaagaccacgcagacactgaaaatggtggcggaaaatggtcgttgggtcattgacgatattgtcagcaatcatggcagcgtcttacaagcagttaatagcgagaatgaaaaaacgctggccgctttagctagcttgcaaaaagaacagccggaagcctttgttgccgaactctttgaacatattgctgattatagctggccgtggacgtgggtggtttccgactcttaccgccaggcggttaatgccttctataaaaccaccttcaagacggccaataatcccgatgaagatatgcaaatagaacggcaatttatttacgacaatccgatctgttttggcgaagagagcctatttagtcgcgttgatgaaattcgagtcctggagaaaaccgccgattccgcccgcattcatgttcgttttacgctgaccaatggcaacaacgaagagcaagaactggttttacagcggcgcgaaggcaagtgggaaatcgctgattttatccgcccgaacagcggcagcctacttaagcagattgaggcaaaaactgccgccagattaaagcaatgagctgaattaaataacaattagccggaacaataaataaaagggaacactatatgaaaacgattttcaccgtgggagctgttgttctggcaacctgcttgctcagtggctgcgtcaatgagcaaaaggtcaatcagctggcgagcaatgtgcaaacattaaatgccaaaatcgcccggcttgagcaggatatgaaagcactacgcccacaaatctatgctgccaaatccgaagctaacagagccaatacgcgtcttgatgctcaggactattttgattgcctgcgctgcttgcgtatgtacgcagaatgataaaaaaatccccggtagcgtgtcagttgccggggatattttttaacgtccaaccgccgctttaggccgtttcttcgcaccagcattcaccggacgagattgcgtagagctcgctttttttgccgtagcaggcgtctgacgctgggtcgccatcggcgtatgtttcgtcaacgccggacgggtattgcggttctggcgacgagcttcacgcatctcttcaatggttggcgcaggcactaagcaatcgcgacggctgccaatcagatgctttttgcccatcgcttccagcgcctggcggattaacggccagtttgccggatcgtggtaacgcaacaacgctttatgcaaacgacgctgtttgtcgcccttcggtacgaagacgtcttcgctcttataaccaatcttcgccagcgggtttttcccggtgtaatacatggtggtactgttcgccagcgggctcggatagaagttctgcacctggtcgaggcggaagcggtgctttttcagccacagcgccagattcaccatatcttcatcacgcgtaccggggtgcgcggagatgaaataggggatcagatactgctctttacctgcctgtttactgtaagtatcgaacagctctttaaagcggtcatagctgcccatgcccggcttcatcatcttgcttaacggcccttcttcggtatgttccggggcaatcttcagataaccgccgacgtgatgggtcgccagttctttgatatagcgcggatcttctacggctatgtcataacgcacaccagaggcaatcaggatctttttaatgcctttcagatcacgcgcacggcgatagaggttgatcgttggttcgtggttcgtgtccatgtgcggacaaatatccggataaacgcagctcaaacggcgacaagtttgttcagcgcgtgggcttttgcagcgcaacatatacatgttggcagttggcccaccaagatcggaaatcacgcccgtaaaacctggaacggtgtcgcggatcgcttcgatctcattaatgatgctatcttcggaacggctctgaataatgcgcccttcgtgctcggtgatagaacagaaagagcagccgccaaagcagccacgcataatgttgacgctaaaacggatcatttcgtaagccggaatacgggcattgccataggccggatgtggcacgcgcttgtatggcagcgcaaaaacgctgtccatctcttcggtagaaagcggaatagcaggcgggttgatccacacatagcggtcgccgtgtttttgcatcaatgcgcgggcacagcctgggttggtttcgtggtgcagaatacggctagcatgggcgtacagcactttatcgcccttcactttctcgaaagaaggcagcaacacgtaggttttttcccacggtttcgggcgcggtggctgcacggttacggctttggcttcctgctttttcggtgccaccggtttgttatccgcgcacggcaaatcttcaccatacggatgcgggattgggtcgatttttccaggggtatcaagacgggtggaatccacgccgctccagccaggcagcgcctctttcacgataatcgcggtattacgcacatcgcggatttcactaattggctcgcccatcgccagacgatgcgccacttccaccagcggacgctcaccgttaccaaacatcagcatgtcggctttgctatccaccagcacggaacggcgcacggtatcggaccagtaatcataatgcgcggtacggcgcagactagcctcaataccgccgaggatcaccggtacatctttccacgcctctttacaacgctgggtataaaccagtgtggcgcgatccgggcgcttacccgcgacgttatccggcgtgtaggcatcgtcatgacgtaaacggcgatcggcggtataacggttgatcatgctatccatgttgccagcagtaacaccgaaaaacagattcggtttacccagacgcataaagtcgtctttgctgctccagtccggctgggcgatgatcccgacgcgaaagccctgcgcttccagcatacgaccgcaaatcgccatcccgaagcttgggtgatcgacatacgcgtcgccagtaaccaaaatgatgtcgcagctatcccagccaagttgatccatctcttcacgagacatcggcaaaaacggtgccggtccaaaacaggcggcccagtactgcggccaggagaacaggtcgcgatccggttggatcagggagatagagctcattttgcttccagaaatgataaaaaaataatcaaaggccggggattataagccggaacgaaagagaaatcgaaaggtattccatactcgccctcctcgggcgagtatgaagattacggtaccggattgaccaacagttgcccaatgctgccacggtccgccatttccagcgtctgactgttgaagtagaacgggaagtgcgcccaggaaggctgaccgaaataaacaagcagctccacttgtccgtcaacccaaacggtatctttccagcctctgtcttccgggaacggcatcgcgccattcacgttacggatctggaacattacgccttcaatatggaacgcttgcggctcgtccgcgcgtaccgtccagcgttcccacgttccttgctgcgcggtgacatcaatacggttgacgtcccacagctgtccattaatacccgggtcatcacccagactgatatcgcgactgcgaattgggctaccagccatgatttcagttggcagcaagcgcatcggaagactgtctgtgaccagcggcagaaggccggttgggcgcagcgttagcaccagggtagaaaccagaatactggatggctcaaagaagccacgaatacgatcaacaatgctcgccgcttcgccacaggtgatgctcacttcatcgccgttgctcatatccaccagaatctcgcggcgctcgcccggtgccaggctaagttgcttcacgcttacaggagcaggcaggaatccctgatcgccagaaatcacatgtaacgggcgaccatcgttcatctgtagttgatagcgacgagagttgctcgcgttcagcagtcgcaagcgcacccagccacggctgacttcaacgtacgggctttgtacaccgttaaccagcagcgtatcaccaacaaagccgccgcttcccggttcgttgtattctggcgtaccaaagttatccagccgtttatcctggataatgaccggaaaatcatccacaccataatggttggggataggcaggctcttgctgacttcatcttccaccagccacattccggcaaggccgttatagacctgctgagccgtgcggttgggagtattggcgtgataccacagagtagctgcgttctggcgaatgggcagtacgggtgcccagtcagcgtttgggctcatcatccgtgccggaccgcccatcagcgggcctggtacctgtagcccggccaccgtcatactgacattttctgtcaggcggttgctgtaaataagcttaacatcgtcgcccttccagacgcggatagtcggccccaggtaacgaccattgattccccagacgctcgcgcgtgtccctggcgtaaaactccagtgcgcacgttgtacagtcataaacagcggttgcccacggcgagattcaagtagcggcggaacgggtagcggttgctgttgcccggctgcgctggccttcaggggaacagcgcctgcacaaagtgcaatcccgcttgcctgaatgaactgacgccgactgagactcatatttgctccatgtaaaactggctaaagtaataccgtgcaggaaagtgttccccgcaaaaatacagattgccgacttaaacttttccggcggcttcgcgttctgcgacttctttatcgagctcggcgattttttgttccattatgctacgacaatgggcagccagctcacgaacctgatctttgccatactgactgacgtcaattggcggcagcatttcgacaatcaccagaccgttgtgcagtcgattaagattaatcttattgctagttgtagagacgcacacgggaataatcgggacgcccgccgcaattgccgcgtgaaatgctccagtcttgaacggtagcaggccgcgaccacggctgcgggttccttccgggaacatccagatggaaatacggcgttttttgaagtgattcactacttccgcaatggtgccgtgagctttagtgcgattgtttctgtcgatcaataagttgccggttaaccagtacaactgcccgaagaaggggatccacagcaagctctttttacctaccgtcaccgtcggcggttgcacgatgttgcttgctgtcaccatgtcatagttgttctggtggttagcgatatagatagcattgccgtagctttcagcgtctgtaggtttacggcactcaactttcaggccaaacagcggcgcaagacggccaaacatatgcccaaaggtggccacatgtttcgggttacgcgggctgaaaaggcagtaaatggagccgaatacacagactaagatgctgtaaatcacggtaataataagacgaaagatatatagcataacaccctctgaaggtctgagagactggcattgtacgtcacctgaaatcaggttagggcattgttaaaagccgctctctggaaaagcgtattgttaatcgcaacgcatgaataaacaacggtttcaagggaatttttatcgtttccgggggttgaatacgctgccggatgacgacttaacgtttcatccggcgttccttgcaagcgggaggaaacagcgccctccccggcatattactcttcgctatcaccgctgctggcacggcgaggagagtcgatctcaacacgatcgatacgctgcaaaccgcgcatcaacgtaccgcggcgtccacgttcgccagtgactttctgtaactcttccgggcgcagtttaattttgcgtttcccaacatgaatggtcagcgtgctttgcggcggcagaacgtacaattgcgccagaccatcttctccacgcgcggcttctgcgcttggaatgttgataatcttgttgcctttgcccttgctcagctgcggcagatcacttaccgggaacatcaacatacggcctgcctgagtgattgccagcagcatatcggaagcatcttcaatcaccaccggcggcataacatgggcattttccggtaaggtgatcaaagccttacctgcacggttacgcgccaccagatcgttaaaggtgcagacgaaaccgtaacccgcatcggaagccatcagcagtttctgatcgtcgctttccatcagcatatggtcaacggtcgccccaggcggcaacgttaatttgccggtgagcggctcgccctgaccacgcgcgctcggcagcgtaatcgggtcaatggcatagctacgaccggtggaatcaacaaacactaccggttggttgctcttacctttcaccgccgctttgaagctatcacccgctttataattcaggcccggcgcgtcgatatcatggcctttagcgctgcgtacccagcccatctggctcagcacaatggtgacaggttcagacggcagcatgtcgtgctcgctcatcgctttcgcttcttcgcgttcctgcaacgggctacgacgatcgtcaccgtaggcttgcgcgtctgcctgcagttctttcttcagcaggttattcattttacgctcggaagccaaaatgccctgcaactggtcgcgctctttttccagttcactctgctcaccgcgaatcttcatctcttccagtttggcaagatgacgcagtttcagttcgaggatcgcttccgcctgggtttccgtaaggccaaaccggctcatcagcgccggtttcggttcatcttcattacgaatgatctcaatcacttcgtcgatattgagaaacgccaccagcaaaccttcgaggatatgcaggcgcttgaggactttctccagacgatagttcagtcggcggcgcacggtatcgcggcggaacaccagccattcggagaggatttccagcaggtttttcaccgccggacgaccatccagaccgatcatattaaggttaatacgatagctcttttccagatcggtggtagcgaagaggtggttcatcacctgatccatatccacgcggttggaacgcggcacaatcaccaggcgggtcgggttctcgtggtcagattcatcgcgcagatcgtcaaccatcggcagctttttgttgcgcatttgcgcagcaatttgctccagtacgcgcgcaccactaacctgatgcggcaatgcgctgataaccaccgcgccatcttctttcttccacaccgcgcgcatacgcacactaccacgtccgttctcgtagattttacggatctcggcgcggctagtgataatttccgcttcagtcggataatccggcccctgcacgatatccagcagctgatcgagcgtggttttcggctggtcgattaatgcgattgccgcctgagccacttcacgcaggttatgcggtggaatatcggtcgccatgccgacggcaataccggtggtgccgttaagcaaaatgtttggcagacgggcaggtagcattttcggctcctgcaaagtgccgtcgaagtttggcacccagtcagccgtcccctgccccagctcgctcaatagcagctcggaatatttgctcaaccgggattcggtgtaacgcattgccgcgaagcttttcggatcgtccggcgcgccccagttcccctgaccatcaaccagcggataacggtaagagaacggttgcgccatcaggaccatcgcttcataacaggcgctatcgccgtgcggatggtatttacccagtacgtcaccgacggtacgggcgctttttttaaatttggcgctggcattcaggcccagttcagacatcgcatacacaatgcggcgctgaacaggtttcagaccatcaccaataaacggcaacgcacggtccatgatcacgtacatggagtagtttaagtaggcgttttccgtaaattcatgtagcgcaaggcgctctgccatatcgctcattaattctgattcctcaacttattcgccagccttcaaaggggcaatattgccggagatactacattatctgccgcgtcgagtcacaggagatcaacgtgaatagcgccgccggacgtgctccgacggcgataaaggcatcaatgtgccttgatatacaactctttgctgtagacataatcctggggattatgcagcggaaaaccgccaacgtagggtttaagcagtttgattaacggctgatagtagataggaatcagcggtgcctgttggttgatgatcacttctgcctgctgatacaacgcattacgctttgtcgcatcagtgatctgcgtggcctggtttagtaaggcgtcatactgcgcatttttccagtgaccgacgttttcttcactatcgcttttgagcgtgttcaggaagctggaagcatcattgtacgtcgcatcccagctctgccgagacagcatgaaatcaccggctcgtcgggcatcaagataggttttccactccattgtgcgcagcgtcacctgtgcacccagccattttttccattcggaagacaacgctatcgcggtcttttcatgcagatcgtacttgttgtagaacagctcaaagcgtagcggatgagaggcgtcgtatcccgcctgtttcagcaaggcttttgccatcgcgacgcgctcactcattggcttttgcagttcatcgaacgtcgtcgcgctaaagccttttacctctggcggcgtcagcgtggttgcgggcgttctcaaccccagtaccttttgcgcaataagctgtcgatcaaccgtaagatatagcgcccgacgcactcgcacatcgttaaatggcggtttctcaaggttgaagttgtaatattcgctgttcagacgcggaataattcgtagctcgccaggcagacttttttcaatggcgggaatttgctgcgccggaacccaggtgagatcgacctctcccgcgcgatagcggttatagccggtgacgctattatctagcgccagatactcaacctgttgcaatactgtatgttgcgcatcgcggtactttggatttttgcgtgcagtaatcttttcgttaactacccactgatcaagcacaaaggcaccgttgtaaaccatgttctctggcttactccagctatcgccatgtttagcgatgacatgatgaggaaccgggaacagcgtcggccaggcgagcatcgtcgtgaaccaaggaaccggctgctcaagcgtaacttcaagagtacgatcatccgtcgctttgacacccaggcttgtaacatctgctttacccgcaacaatagctgcggcattgttaatgtgcgcctgtgccagatagccagcaaaagggcttgccgttttcgggtcaaccgcgcgctgccagccgaggacaaaatcctctgccgtcagaggctgaccgtcggaccactgcaaaccgctacgcagatggaaaatatagcgcttgccgccgtccagtatctcccagcgttcagcctgagcgggctgcacctggccttcaccgtccatccataccagaccttcaaacagatccagcacaatctgcgcggcagtattctcctccaccttttgcgggtcgagcgtacctgggtcgctatgattgttgtaacgaaagacttgttgcggggcgagcggtgtgttggcgggaacgtcagcagcgtagagaggagccgcacttaccaggctgaccagccataataaatttcgcgtatacatggtattccttaccggagaaattataagcccaacaacaatacgcctgtggcattgttcgctcaaacttatcgcgagtgatttggctcacactccggtaaagaaaaaagcgagttgcccccgcttttccattaattaacggatttcattcaatagttctggatgcttatccagaacacgtaaaagtttgattgtggaaggatgaggttgggcattgcctttttcgtaacggctaaacgcatttacacctcccccaaaaatttcgcttgcctctttttgggtaagagagagcttttttcgaaccttcactataaattcaggtgccactgtttcggcattcacgctagcccgaaatgcctttacttgcgccatgaaagcatcactctcttctttattcatgatgctctcttcgcaatggacacaatataaaccgtggatacctttcaatactgtttttcgtccacggaaggtgtatggaatatctttaatgccagaaaccatttctccctggtggcaaaccggacatttcatattacttctccttaaagctgacgatcagtacgtcatgaattaccgtaattttaagataaacctggcctgtaacaagcctgggtctgtaaacatcctgccagatagtatgatcagagtaggtggtcatgcttttataaaagtcgctctcacttaatccaatgataacattacacataccatcaaaatccaaacctaactcatctgcatttaacagggcactacgtgttgtacgaacttgcccggcattgacaagttttttaacctgactcaaacgtgtatgtggtgtgcgtttttccataacccccgcctccctgttactttagttataacctaaaaggttaattacagcaatgaaaaagcacctaaaaggttagttagatgtacggagatagtgaccacacaaaacgtattctttaaggaaagtgattgaccatataagaaagtggcgcattagtagcgccagtttgaagcaggaatttataagggaagctggagtcaggcatcacgccaacggcacataaacatccgtttccagtcgctgctctgtcaccccttcggcaagattggtgtagtgaaacagaatcggtgctttacgcattttctcgccgcttgcaggcagccagtggcgaatgatgccccataccgtgtgactaatatcgtccagctcgccaacgtggcgggccacggcataacgtccaccggtaagttcaccattgctcacaccataacgattatcgggaatcggttcgctaacgctgccgcagatatcaaagcgaaacgcttccggtgcggtggtggcagggtcgtcccaggcgacgccaaaagtctggctttggttaacaggagaaagccccgtctctttacgccacatgataaatttcgccacgctgtagttgagcaattcagggctacagcggtgcggcaacatcgccacaggtatacttgggaaatcgataatgtttacatccagtgtcaggtttgtcattttgcctccctgcgaaattattcccgggaacgcgtcccgggagcggtaacaattacggatttactttgcggatctgtttgacgtcaatttcaacagaattccagtctttatcgacttcaccctgaatctcaaccgtatctttcggcgtcaccgtcacgccgttccagcgtttgtggtcgatatcaacattgatagtaccgctggcatctttgaacacgtagagatcgtcagagatgcgttcaacgatattgccgcgcagggttacccaggtgtcgtcacgcagggattttgcgctttctacagtcgttacgctgccgttcggcccctggaatcctccggcctgactttgcgttgcgcttgggccagaaaaaccgccctgctctgctgccatcaccggtgcgctgcacagggccattactgcgattactgctgcgaattttttcatgtttattactccctttaatgtctgtttccgagcatttaacaagatagtccttaacaacttcttaagggaaaaaaataaaatttagtgctgtacagagcgcgttacaacacggtttactggcagcaaatacggttatcgcagggatgaaaaaatgcgaattttactgatagaagatgacatgctgattggcgacggcatcaaaacgggccttagtaaaatgggttttagcgtcgactggtttacacaaggtcgtcagggaaaagaggcgctttatagcgcaccttatgatgcggtgatcctggatttaaccttaccaggcatggatggtcgcgatattttgcgcgaatggcgagaaaaaggtcagcgtgagccggtactgatcctgaccgcgcgcgatgcgctggcggaacgtgtagaagggctgcgtctgggagctgacgattatctgtgtaaaccttttgcgttgatagaagtcgccgccaggctggaagctctgatgcgccgaaccaacggccaggccagcaacgagctgcgccacggtaacgtcatgctcgaccccggcaaacgtatcgccacgctggctggcgaacccttaacactgaaaccaaaagaatttgccctgctggaattactgatgcgtaacgctggtcgggtactgagccgcaaactgattgaagagaaactgtatacctgggacgaagaggtcaccagtaatgccgttgaagtgcatgtgcatcatctgcgacgcaaactcggtagtgattttattcgtaccgtgcatggtattggttacacattaggtgagaaatgaaatttacccaacgtcttagtctgcgcgtcaggctgacgctaatctttttaattctggccagcgtgacctggctgctttccagctttgtcgcctggaaacaaacaacggataacgtcgatgaattgttcgacacccaactgatgctgtttgccaagcggttaagtacgctcgatctcaacgaaatcaacgcggcggatcgcatggcacagacgccaaatagattaaaacacggtcatgttgatgacgatgcgctgacctttgccatctttacccacgacggcagaatggtccttaatgatggcgataacggagaagatattccctatagctatcaacgggaaggttttgctgacgggcaactggtcggtgaagacgatccttggcgttttgtctggatgaccagtcctgatggcaaatatcgcatcgttgttggccaggaatgggaataccgtgaagacatggcgctggcgattgttgccgggcaattgatcccgtggctggtcgcactgccgattatgttaatcatcatgatggtactactgggtcgtgaactcgcgccgctgaacaaactggcgctggcactacgtatgcgtgaccctgacagcgaaaaaccactaaacgcgactggcgtacccagcgaagtgcggccactggttgagagcctaaatcaactgttcgcccgcacacatgcgatgatggttcgtgaacgacgctttacctccgacgcagctcacgaacttcgtagcccgttaacggcgctgaaagtgcaaaccgaagttgcgcagctctctgacgatgatccgcaggcgcggaaaaaagcactgctccaattacattccgggatcgatcgcgctactcgtctggttgatcaactgctcacgctaagccggctggacagtctggataaccttcaggacgtcgcggagatcccgcttgaagatctcctgcaaagcagcgtgatggatatttaccacacggcgcagcaggcgaaaattgacgtgcgactgacactcaatgcccacagcatcaaacgcaccgggcaaccgctattgctaagtttgttggtgcgaaatttgctggataacgccgtgcgctacagtccacagggcagcgtggtagacgtcacgctgaatgctgataatttcatcgtgagggataacggccccggtgtgacaccagaggcactggcgcgaattggcgaacgcttctatcgcccacccggacaaaccgctaccggcagcgggcttgggctaagcattgtccagcgaatcgccaaattgcatggcatgaatgttgaatttgggaatgcggaacaaggtggatttgaggcgaaggtaagctggtaacttctctgtctatgagagccgttaaaacgactctcatagattttattaatagcaaaatataaaccgtccccaaaaaagccaccaaccacaaaccagacaaataccgaggctgaatacatatacccaaaactcgaacatttcccgcataaagagttttcttaagataagaataataagtggcgtaagaagaaaaaatgctgcaatcattgcttgcaatatacgatcttcgccactaacggaaggtatactgcaaatatttcctccgctctcaagcatccagtcatacttattgaaagcaaaaaaagaatctattaaccaataagtaagcattatatatagcaatgcttcaaatattgttttaattttctgctttaacatatatcagtacgctcataaaaatccatttataattatcaacatgacacgttgatactttcatcttttacttattcaaagccatattttcaatccccaaaaaaaccgaaccaaacgtgtaaattattccggtgcgagtaagaattatgaggaatggctatcagtattgtcattttcagaaaatatttatcctgcatcggtgagtcagagtaagatcagacttttgctaaattcgcaaaagactttgcacattttgctaatttcaccgtaccgctctgtgacgtactatagtcggcaaacgtctcaccttgaggttaaaaaatgagcaacatcctgattatcaacggcgcgaaaaaattcgcccactccaatggtcaactgaacgacaccctgaccgaagtcgcggatggcacactgcgcgaccttgggcatgatgtccgcatcgttcgcgccgacagcgactacgatgtcaaagcggaagtacaaaactttctctgggctgatgtggtgatctggcagatgccaggctggtggatgggcgcgccgtggacagtgaaaaaatacattgatgatgtattcaccgaaggtcacgggacgctgtatgccagcgatggtcgtacccgcaaagatccgagcaaaaaatacggttccggcggcctggtacagggcaaaaaatatatgctttctctgacctggaacgcaccaatggaagccttcaccgaaaaagatcagttcttccacggcgttggcgttgacggtgtgtatctgccgttccataaagcaaaccaattcctcggtatggaaccgctgccgacatttatcgctaatgacgtgataaaaatgcctgatgttccccgctatactgaagaatatcgcaagcatcttgtggaaatttttggttaactagagctcaggctttagaaggagttaaccatgcttaccgtaatcgcagaaatccgtactcgtcctggtcaacatcaccgtcaggcggtattggatcagtttgctaaaatcgttccaaccgtactgaaagaagaaggttgccacggctatgcgccaatggtggattgcgcagctggcgtgagtttccagtctatggcaccggattctatcgtgatgattgagcagtgggaaagcatcgcgcatcttgaagcgcatctgcaaaccccgcacatgaaggcgtatagcgaagccgtaaaaggtgacgtgctggagatgaatatccgtattctgcagccagggatttaatcctgccttgtttgcccggccatcctgaccgggcaatgttctttcctttaaacctcaatctccgccatgtcgcctttctcttgcaaccagttgcggcgatcttcgctgcgtttcttcgccagcagcatatccatcatcgcgtcagtacgctgatcgtcttcatcatcgatagtcaactgcaccagacgacgagtgttcggatcaagcgtggtttcgcgcaattgcatcgggttcatttcccccagacctttaaaacgctggacgttcggcttgcctttcttgcgttttaattgctcaagtacgccctctttctcttcttccgtcagcgcgtaataaacctctttcccgagatcaatacggtagagcggtggcagtgcgacgtaaacgtgaccgtgtttcaccaacgcgcggaaatgttttacgaacaaagcgcagagcagcgtggcaatgtgcagaccatcagagtccgcatccgcgaggatacagattttgccataacgaagctggctcagatcgtcgctgtcaggatcgataccgatcgctacgctaatatcgtgcacttcctggctagccagcacttcgtcggaagagacttcccaggtgttaaggatcttacctttcagtggcatgatcgcctgatattcgcgatcgcgcgcctgcttggcagatccgcctgcggagtcaccttccacaaggaacagctcggtacggttaaggtcctgcgcggtacaatcagccagtttgccaggcaacgccgggccgctggtcagctttttacgcaccacttttttggccgcacgcatacggcgctgggcgctggaaatcgccatctccgccagcagttcagccgcctgaacgttctggttcagccacaggataaaggcatctttcaccacgccagaaacgaatgccgcgcattgacggctagagagacgctctttcgtctgcccggcaaactgcggatcctgcatttttacactcagcacataggcgcagcgatcccagatatcttccgcgctcagctttacaccgcgcggcagaatattgcggtattcacagaactcacgcatcgcgtccaacaggccctgacgcagaccattaacatgggtaccgccctgcatcgttgggataaggttgacgtagctttcggtcagcagttcaccgccttccggcagccacagtagcgcccagtccacagcttcagtatcaccagcgaaattaccgataaacggtttttccggcagcgtcggcagaccatttaccgcttccgccaggtaatcattcagaccgtcctgatagcaccagcgttgttcggtattgttgatctcatctttaaaagtgatctcaacgccagggcacaataccgctttggctttcagcacatgcgtcaggcgactaacagaaaatcgcgggctgtcaaagaaggtttcatccggccagaagtgcacactggtaccagtattgcgtttaccgcaagtgccgacaacctgtaaatcctgcaccttttcgccattttcaaaggcgatgttataaacctgaccatcgcggcgcacgttaacttctacgcgcttgctcagggcgttaaccacgctaatccccacgccatgcaggccgccagagaactggtaatttttgttagagaatttaccgcctgcatgcagacggcaaagaatcagttcaaccgccggtacaccctcttccgggtgaatatccaccggcatcccgcgcccatcgtcaataacttctaagctctggtcagcatgtaaaataacgtccacgcgttttgcgtgacccgccagtgcttcatccacactgttatcaatgacttcttgccccaaatggttagggcgagtggtatcggtatacatccccggacggcggcgaaccggctcaagcccggtgagtacctcaatggcatcagcgttataagtttgcgtcatggtttaagttagtaattcgagttgatcgtcagagatggtgcagaccaagaaaatcgacgatcgggttgaaataatcttcgaagcccgtgaatgcgtggttgccgccttctatgacagtctggcggcaggaagcgtagtacgccaccgcctggcggtaatccagcacttcatctcccgtctgttgcagcagccagatcaaatccggcgcttccagcgggtcaatctgcatgactttaagatcgtaaatatggcgactctctagcacatattgctgcccggtgtaggggttctcgttctgaccgagatagtccgtcagcagttcaaacgggcgcaccgccgggtttaccaccactgcgggcagcataaaacattgactcaaccaggtggcgtaatatccccccagactgctaccgacaatacccaggctatcaccgccatgttccaggacaatggattccagcagctctgccgcgtcggaaggatacggcggcaactgcggaatgatcatctcaacgtcagggtgatgttccgccagccagttttttaacaagctcgcttttgcagagcgcgggctgctgttgaaaccgtgtaaataaagaagcgtagacatcagtagccttcactagcggtatcaggttggaaacgtgtgtccgccaggcgatgcacctcggtggtcagcgtgccatcagcatgtaactcgagagtacgccagccgggcgcgatggtatccagcgtaaagttggaacagtgcggcttaaactgcacacaggtgctcggcgttgccagcaggcggcgaccattccagtcgagatccagctcctgatgaatatgaccgcacagcaagtatttgacgtgcggaaacttcgccagcacggtatccagttcgcccgcgttacgcagactgtgttgatcgagccaactacaacccgcaggtagcggatgatgatgcagcagcagcaacgtatggcgttctggcgcatcggccagtttacgttccagccactcaagctgaaactcgctcagctcaccgtgcggcacgccaaacacctggctatccagcaacaggatttgccattgctcaccaataaacacgcgcttcgccggggagatacccgcatcctgtaacgcgctgtacatcgcgggctggaaatcgtggttgcccggcagccagacgcagggcgcacgaaaacttgcgatgccttcagcgaaatgctgataggccgcagaggattgatcctgcgctaaatcacctgtcgcgacaatcaggtcgaattcgtgctggtgtggccgaatcgcctccagcaccgcctggtaactctcccaggtgtttacccctaacagggcttcgtgcttttgtgcaaacaggtgagtgtcggtaatttgtaaaatcctgactctggcctcaccagccagaggaagggttaacaggctttccaaatggtgtccttaggtttcacgacgttaataaaccggaatcgccatcgctccatgtgctaaacagtatcgcaaccagtccgctaaaaactgattaatttgatgcttttcgtcgcgttgatgcaactttttattaggataatcataccgcgctttgaagcgaaaaatctgctggctactacacacttcagccaccatcgcgtcatgatacagacgcaccgtcatactcggaaggctccagtaactgatcgcgggcgcagtctgttctattgtcaccagggtagtgtatcgggtgctttccacaatcgtcagccgatattgtgcgtttgccacctgatagcttacagtttcgccgggtgcgtcattgcgcggtaacaaacggcgcaattgactaaagttcatctcgcacaggcgcatcatttcaggaaagtcaggtgtgtaacgcttcatttatgcccactcattttttaacgcttgatgatgcagctgcagccattgcaaagcgatgacgctcgctgcgttgtcgattttcccctcttctacccactggtatgcctgttcccggcttaccacatgaacgcgaatatcttcgttttcatcagccagaccgtgaataccgcttgcggtcgtggcgtccacttcgcccaccataatactgctacgctcactggtgccccccgggcttgccaggaaacttaacaccggtttggtccgtttgactatcagtcccgcctcttcaatcgcttcgcgacgggcaacatcttccacactttcaccctcttcaatcatcccggcaaccatctccagtagccaaggggtttcgctggtgtcgtacgcggcaatccgaatctgctcaatcagcacaacttcatcacgcactgggtcaaagggtagcaagactgcggcgtgaccgcgctcaaaaatttcccgccgcacctcatgactcatttgcccgttgaatagacgatgacgaaatctataaagatctaaactaaaaaagccgcgataaagtgtttctcgtgcaataatttctacatcgtttttgccaaatgtaacgggcaggttgtctggcttaagcattgttaatgtcctggcactaatagtgaattaaatgtgaatttcagcgacgtttgactgccgtttgagcagtcatgtgttaaattgaggcacattaacgccctatggcacgtaacgccaaccttttgcggtagcggcttctgctagaatccgcaataattttacagtttgatcgcgctaaatactgcttcaccacaaggaatgcaaatgaagaaattgctccccattcttatcggcctgagcctttctgggttcagtagcttgagccaggccgagaacctgatgcaagtttatcagcaagcacgccttagtaacccggaattgcgtaagtctgccgccgatcgtgatgctgcctttgaaaaaattaatgaagcgcgcagtccattactgccacagctaggtttaggtgcagattacacctatagcaacggctaccgcgacgcgaacggcatcaactctaacgcgaccagtgcgtccttgcagttaactcaatccatttttgatatgagcaaatggcgtgcgttaacgctgcaggaaaaagcagcagggattcaggacgtcacgtatcagaccgatcagcaaaccttgatcctcaacaccgcgaccgcttatttcaacgtgttgaatgctattgacgttctttcctatacacaggcacaaaaagaagcgatctaccgtcaattagatcaaaccacccaacgttttaacgtgggcctggtagcgatcaccgacgtgcagaacgcccgcgcacagtacgataccgtgctggcgaacgaagtgaccgcacgtaataaccttgataacgcggtagagcagctgcgccagatcaccggtaactactatccggaactggctgcgctgaatgtcgaaaactttaaaaccgacaaaccacagccggttaacgcgctgctgaaagaagccgaaaaacgcaacctgagcctgttacaggcacgcttgagccaggacctggcgcgcgagcaaattcgccaggcgcaggatggtcacttaccgactctggatttaacggcttctaccgggatttctgacacctcttatagcggtagcaaaacccgtggtgccgctggtacccagtatgacgatagcaatatgggccagaacaaagttggcctgagcttcagcctgccgatttatcagggcggaatggttaacagccaggtgaaacaggcacagtacaactttgtcggtgccagcgagcaactggaaagtgcccatcgtagcgtcgtgcagaccgtgcgttcctccttcaacaacattaatgcatctatcagtagcattaacgcctacaaacaagccgtagtttccgctcaaagcagtttagacgcgatggaagcgggctacagcgtcggtacgcgtaccattgttgatgtgttggatgcgaccaccacgttgtacaacgccaagcaagagctggcgaatgcgcgttataactacctgattaatcagctgaatattaagagtgctctgggtacgttgaacgagcaggatctgctggcactgaacaatgcgctgagcaaaccggtttccactaatccggaaaacgttgcaccgcaaacgccggaacagaatgctattgctgatggttatgcgcctgatagcccggcaccagtcgttcagcaaacatccgcacgcactaccaccagtaacggtcataaccctttccgtaactgatgacgacgacggggcttcggccccgtctgaacgtaaggcaacgtaaagatacgggttatctgccgcattcttcccccttcagccttcaatttcgaccagccatcctctattctgatgggtatttaccactggtcccggaagacaaaaatgaaacggacaaaatccatacgccacgcatcgttccgcaaaaactggagcgcacgccatctgacaccagtcgctctcgcggttgccactgtttttatgctggctggctgtgaaaagagtgatgaaacagtgtctctctatcaaaatgctgacgactgtagtgctgcaaacccaggcaaaagcgccgaatgtaccaccgcgtacaacaatgcgctgaaagaagccgaacgtactgcgccgaaatacgccacccgtgaagactgtgttgctgaatttggtgaaggtcagtgccagcaggcaccagcccaggctggcatggcaccagaaaaccaggcgcaggcccagcaatccagcgggagtttctggatgccgctgatggccggttacatgatggggcgtctgatgggcggcggcgcgggatttgcacagcagccgctgttctccagcaaaaacccagccagtccggcttacggtaaatataccgacgcgacgggtaaaaactatggcgcagcccagccaggccgcaccatgaccgtaccgaagacggcaatggcaccaaaaccggcgaccaccactaccgttacccgtggcggttttggtgaatctgttgccaaacaaagcactatgcagcgtagtgcaaccggtacctcttctcgtagtatgggtggctgataccgatggaaagagtcagtattaccgagcgcccggactggcgtgagaaagcccacgaatacggtttcaattttcacaccatgtacggcgagccgtactggtgtgaagatgcttactacaagttgaccctcgcccaggttgaaaagctggaagaagtcaccgccgaactgcaccagatgtgcctgaaagtggtggaaaaagtgatcgccagcgatgagctgatgaccaaattccgcattccaaaacacacctggagttttgtgcgccagagttggctgacgcaccagccaagcctttatagccgtcttgatctggcgtgggatggcactggtgaacctaaacttctggaaaataacgccgatacgccaacgagtctatacgaggcggcgttctttcagtggatctggctggaagatcagcttaacgccggtaacttgccggagggcagcgaccagtttaacagtctgcaagaaaaactgatcgatcgcttcgttgagctgcgtgaacagtatggcttccagttgctgcatctcacctgctgtcgcgacacggtggaagatcgcggaaccattcagtatttgcaggactgcgcaacggaagctgaaattgctactgagttcctctacatcgatgatatcgggttaggtgaaaaaggtcagttcacggatttacaggatcaggtaatttccaacctgttcaaactgtatccgtgggaatttatgttgcgtgagatgttcagtaccaagctggaggatgcaggcgtacgctggctggaaccggcgtggaagagcattatctccaacaaggcacttctaccgctactgtgggagatgttcccgaatcacccgaacctgctgcccgcttattttgcggaagatgatcatccgcaaatggaaaaatatgtggttaaaccgatcttctcccgtgaaggcgcaaacgtgagcatcattgagaacggcaaaaccattgaagcagcggaaggtccgtatggcgaagaagggatgattgttcagcaattccacccgttaccgaaattcggcgacagctatatgctgattggtagctggctggtgaacgatcaacccgccggaattggcattcgtgaagaccgtgcattgatcacccaggatatgtctcggttttatccacatatttttgttgaataagccacgataccggatggcactcgccatccggtaattgttagcctatctgcacgctcagcatactcaggctgcccatttctataccctcaaccggaatggtaattggctcctgcccatcccacgcacctaacacatacaacaacggcaaataatgctctggcgttgggttgcttaacgtgccaccttcatggtcgaggtaattcaccagaggatgttgttccactggcccttgccacgtcagattcgctttcacatactcattaaagctcgtcgcccacggatacggactactatcaccgtgccacttcactgtgcgcaggttatgcaccacgttaccgctggcgaccaacattattccttcatctcgcagcgctgccagtttgcgccccatttcgaaatgccaggcggcaggtttgctactgtcgatactcaactgcaccatcgggatatcagcgtcaggatacatcttaatcagcacgccccagctgccgtggtcaaagccccaggcttctttatccagcgtcaccgggatcggcgctaacagctcaaccagacgctgtgccagcgcagggctacccggagcaggataatgcgtatcgtacagcgcctgcgggaagccaccaaagtcatgaatcgtgggcggcgtctccatcgcggtcactcctgttccacgggtaaaccagtgagcgctaaccaccacaatcgcttgcgggcgtggcaatgtcatccccaacttctgccagctgcgggtatacaaattatcttccagcacgttcatcggactaccgtgacctaaaaacaatgctggcatacgtgtactagacatgatgatatccttaactaaaggtgtcattttgatatcctcacaatacgcttgttcggcggagtaagaacccggataacaatgatgatgatcatcagttattttgacgatctgcctgaaggtgaagatttataaggagttgtcgatgagtgtacctctcattctgaccatactggcgggggcagccacgtttattggcgcgtttctcggcgttctcgggcaaaaacccagcaaccgcttactggcgtttagcctaggttttgcggcggggatcatgttgctcatcagtttaatggaaatgcttcctgccgcactagcagctgaaggaatgagccctgtgttgggttatggaatgtttatcttcggtctgcttggctattttggcctggaccgcatgttgccacatgctcatccgcaggatttaatgcaaaaaagcgtgcagccgttgccaaaaagcatcaagcgcacagccattctgctcactctcggcatcagtctgcataacttcccggaagggattgccacctttgtcacggcgagcagcaacctggagctgggatttggcatcgcactggccgtcgcgttgcacaatatccctgaaggtctggcagtggcaggcccggtttatgcggcaacggggtctaaacgcaccgcgattctgtgggcggggatttctggactagcagaaattcttggtggtgtgctggcgtggttaatcctcggtagcatgatttccccggtggtcatggcggcaatcatggcggcggttgcaggaattatggtggcgctcagcgttgatgaattaatgccgctcgccaaagagattgaccctaataataaccccagctatggcgtactatgtggaatgagtgtgatgggattcagtttagtgctgctacaaacggcgggaattggttaaaaacaacatcagaagttgtccagcgcatggacaacttctgccagcttcacgaaagccttattctaccttttcggctgtctcttctctcgtactgtttaagtatttgttccgcgcttcaagcagtgcgtctctgtcctggcgaaacgcccgacaataacgtttcaaatgcaggaaataacccaccacaaccagagcaatcaatacaatccagtaccaggcgataaacatccttttacccttaatatttaacaatactaaacatttagcgtataaatttcacatatcctttttcggatatattcatatggtcgcataataacggaacaattatatgattttgatcataatgaaaaagaatgcctgatattaatgaaattttctcatagaaagagaagcggaattaacatcttgcatagcagggaaaaataaaaaccgaagcctgctacaacttcggtttcttgattaaggcagtaaattaagcagcggttttcagctggctttacgctcatgtgcctgacggtatgccaccaggtcttcaatagtcacgagcgccatattgtgtttattggcaaactcaatacactctggtgcacgcgccatcgtgccatcgtcattagtcagctcacacagtacaccagccggtttaaagcctgccagcgtcatcagatcaatagttgcttcagtatgaccgccacgcgtcagtacaccacctgcctgagcgcgaagtgggaaaacgtggccaggacgattcagatcactcggttttgcgccatcggcaatcgctgcgcgaacggtcgtaatacggtcagcggcagaaacaccggtagtcacaccttcagctgcttcaatggtcacggtaaaaccggtgccataggcgctggtgttattttctaccatcattggcagatcgagttgtttacggcgatcttcagtaatgcacaggcaaacaataccgctaccgtggcgaatggtcagcgccatctgctcaacagtcatggtttctgccgggaagatcatatcaccttcgttttcacggtcttcatcatcaagcaccattacaccgcgtccttcacgcagcgcagccagtgcattttcaacacgttcgaaaggcgtaccaaaagaggaaagtagcgtctgattcatggtaaaaaaacctcactaaaattatggttaccagaatcagggcagtcttaggagtggcggcatatagccaaaataacgtgagcgggtccatgcccgacagaatcgttactctctcccatccggactctaaccgtcggccccggaattacaccggatctgctgtcctttgagttcgcacccaaagcgctcgcgggctttcaactgagttgatttaccgccggtggggaatttcgccccgccctgagaataagcggattcactataacgctaatgattagcggcagcaacgcatagcttcacataattctggtttatatctaatacaaacactaaaacgggccatcaggcccgttatatcagtgctctaactccagctctcttgcctgcatcatctgttgacaataccaggcataacgtgcgcaaaaccaggttctatgttcttcatccatgttaccagtaacggccagaatatcgaccgggcgaccttctgcgtgcattctggcaaaactacgcgccaggaaatcgaaattatttaaagaattaagactatgatccataagcacatcctccggttatcgcataccttttaaggccatatgctttttctgatttcagtattccccaatcagtgtagtgcctttaaacataacgtgcgtaaatatattgtccccgatcacactttttagtgaaaaataaaaaaccatattaaaagactttctcttccagaacttctctaacctgtgttattattaacacagataaatgtaagcaaggaaactattacaaagtaaatattgcgtcactaaatggacattggagtgatatatgattttattcgccgactataacaccccttatcttttcgctatttcctttgtactgttgatcggcctgttagaaatttttgcgcttatctgcggtcacatgctctccggtgctcttgatgcacatcttgaccattatgattctataaccacaggtcatattagccaggcacttcattatctcaatattggaagattgccagctctcgtcgttctctgcttactggctggtttttttggtcttattggcatcctgttgcagcatgcctgcatcatggtctggcaaagtccactgagcaacctgttcgtggttcctgtcagtttactgtttacgattattgcggtgcattataccggtaaaatagttgcgccctggattccacgcgaccatagtagtgctattacagaagaagaatatattggtagcatggcgttaattaccggtcatcaagccactagtggtaatccctgcgaaggaaaactcaccgatcaatttggccaaatacattatttactactggagcctgaagaaggaaaaattttcactaaaggagacaaagtgttaattatttgccgactttctgcaacgcgatatttggcggaaaataatccctggccccaaatattgtaatttattaatcaaaaggaaatttaataatggatgatattgttaattctgtgccctcctggatgtttaccgcaattattgccgtatgcattctgtttattattggaattattttcgccaggctctatcgtcgcgctagcgcagagcaagcttttgttcgtactggtttaggtgggcaaaaagtggtaatgagcggtggcgcaatcgtgatgccgatctttcatgaaataatccccatcaatatgaatactctgaagctggaagtcagccgcagtaccattgatagcctgattacgaaagatcgtatgcgcgtcgatgtagtagtcgctttctttgtgcgggtaaaacctagtgtagaagggattgccaccgctgcccagacgctggggcaacgcaccctgagccctgaagacttacgtatgttggttgaagataaatttgtcgatgccctccgtgcaacagctgcgcaaatgaccatgcatgagttacaggatacccgcgagaactttgtgcagggggtgcaaaatacagtggcagaagacctgagcaaaaacggtctggaactggagagcgttagtcttaccaactttaaccagaccagcaaagaacatttcaatccgaacaatgcctttgacgccgaaggtttaaccaaactgactcaggaaacagagcgccgtcgccgcgaacgtaacgaagttgaacaggatgtagaagttgcggtgcgtgaaaaaaatcgcgatgcgctaagccgcaagctggagattgaacagcaagaagcgtttatgacgcttgagcaggagcagcaggttaaaacccgtactgccgaacagaatgcacgtattgcggcttttgaagctgaacgtcgtcgtgaagcagagcagacacgaattctggctgaacgacagattcaggaaacagaaatcgaccgcgaacaggccgtccgcagtagaaaggttgaagctgaacgtgaagttcgcattaaagagatcgaacagcagcaggtcaccgaaatcgctaaccagacgaaaagcatcgctattgccgccaaaagcgaacaacagtcccaggcagaagcgcgtgctaatctcgcacttgcagaagcggtaagcgcccaacaaaacgtagaaaccactcgccagactgccgaagccgatcgtgctaaacaagttgccctaatcgctgccgcgcaggatgcagaaaccaaagcggttgaactgaccgtgcgggcgaaagcagaaaaagaagccgcagagatgcaggcggcggctatcgttgagttagccgaagctacacgtaaaaagggtctggcggaagcagaagcacaacgtgcgctgaacgatgctatcaacgtactttctgatgaacaaaccagccttaaattcaaactggccttgttgcaggcgctgcctgcggtaatagagaaatccgttgagccgatgaagagtatcgacggtatcaagattattcaggtcgatggtctgaatcgtggcggcgctgcgggtgatgcaaacacgggtaatgtggggggcggaaacctggcggaacaagcattaagtgccgctctctcttaccgcacacaggcaccgctgattgactccttgctcaatgaaattggcgttagtggcggcagtctggcggcattgactagtcccttaaccagtacaactcccgtcgaagaaaaagcagagtaaaccctcttccaggaataatccctggcccaaaaagccggggattttttatatctgcgttccgctaaaaagtgcaaatgatcaggttgttgcagcattttgcgtgacggctcggggaaggcaaaactgcatcagagaaagcattgcgtggggtctggcgctcatcaacaatcggggagtcagcagggggctgaaacgggaaagcccctcccgaagaagggggccttacagaaggaaagggttatgatgaagctcgtcatcatactgattgtgttgttactcgtaagtttcgcagcttattaacagccaatcagaggggggagaaatcctccctcacccttgttcctttactttaggttgaaaaaaaatcagcgtcaagaaggtttcattaacacatatccctggcccaaaaagccggggattttttatatctgcgttccgctaaaaggtgcaaatgctcaggacgttgcagcgttttgcgtgaccgctcggggaaggcaaaattgcctctgggaaagcattgcgcggggtccggcgctcatcaacaatcggggggcagcaaggggctgaaacgggaaagcccctcccgaagaaggggccttgtataaggaaagggttatgatgaagctcgtcatcatactggttgtgttgttactgttaagtttcccgacttactaacaactcatcagaggggggagaaatcctcccttacccttgttcctttactctaggttgaaaaaacaacagcgtcaataggcctgccatgtacgaagcgagatctgtgaaccgctttccggttagccttttttatcctgttggatcttcttgatgatgttggtcgtgctgcaaccgtcttcaaagttgagcaccaacacttcgccaccgttggcccagacttctttactcccggcaatctcttctggtttatagtcgccgcctttcaccagcagatctggcaagatcccggcgatcaagcgctgcggcgtgtcctcttcaaagctcactacccagtcgaccgcttccagtgcgcccagcacaatcatacgctgttcgagtgggtttaccgggcgggaatcccctttcagccgtttggtggaggcatcgctgttgacggcaacaatcaagcggtcacccagcttgcgggcatttgccagataagagacgtgcccggcgtgcaggatgtcaaagacaccgttggtcatcaccactttttcaccacgtttacgcgctgccgctacggccagcttcagttcctcttcggtcatcacgccaaagcctgtatctgcacgtccacgtacagcattttccagctcgatcgggctaaccgtggaggttcccagtttgccgaccaccacgccagccgccgcattggcaaagaagcaggcttcttccaggctattacccgctgccagcgttgccgccaggacgccaatcaccgtgtcgcccgcaccggtaacgtcatacacttcctgcgcttgggttggcatatgcagcggcgctttacccggttgcagcaggctcataccctgttcggaacgggtcactaacagagcgctgagttcgtaatcggcaatcagtttcatgccgcgctcaacaatctcttcttcggtcttacatttaccgacaacagcttcaaattcgctgagattcggcgttaacagcgtagcgccgcggtagcgctcaaaatcggtaccttttggatcaatcagcaccggaacacccgctttacgcgccagttggatcatctgctgtacgcttgccagcgcacctttggcgtagtcagaaagcaccagcgcgccaatgctactcagcgcctgattaatccgctcgtgcagcggctgcggatcaacaccttcgaaaccttcttcaaaatccagacggatcagctgttggttgcgggaaagtacccgtaatttggtaatggtcggatgcgtcggtacagaaacgaagtcgcatttgacgttgacgtcggccagagatttactcagcgcgcgcgctgcatcgtcaatgcccgtcaacccgaccaggcgtgcattagcaccgagagaagcgatattcatcgccacgttagccgcgccgcccggacgttcttcgatggtattcactttaaccacgggcaccggcgcttccgggctgatacgactggtggggccgtaccagtaacgatccagcatcacatcaccaaccaccatcactcctgcacgttcaaactctggcagcgttactttcattcctgtctcctgagagattcaaaatttgcgcgcgataataccatacttcattcttccaccagccacttctgccagcttgcccgcaccagttcacgctctgcggtgaagcaatcctcgctcacatggcccggcaattcctgtaatgccagatgatgaagttcatcgcgaagcgtagtgtaagcacgggtcagcgccatcgcttcctgctcttccataatgtcgttttgcgccagtagttccagaatacgcacgttgtcactccagcgcgttaacttcggtttttcatgagcgtagcgcaacaccagatattgggtaataaattcgatatcggtaattcccccttcatcagctttgatatcaaagcgatcgcgatgtttattgccgagatgagcgcgcattttctcgcgcatttcccgcacttccgtttgcagagttttaccttcacgcggcagcgtcataatctcgcgacgcactgcgtcaaagtgcgcggtgagctgcggatcgccgtacactacacgcgcacgcaccagcgcctgatgttcccacgtccaggcctcgtttttctgataatcggcaaatgcttctgcggatgtcaccagcattcccgccgccccggacggacgcagtcgagcatccacttcatacaaaatgccggaagaggtacgcgtactgaacagatgcataatgcgttgcgccagacgcagataaaactgccgcccgtcgatttcccgctcaccgtcagtcatcgcatccattgggcaatcatggaggaagataaggtcaagatcggaactgtagcctaactcccagccgcccagcttgccgtagccgaccaccgcaaaaccacgcccttcgcgttcgttcaggtgattcggcttaccgtagcgggcaaccatttgaacccacgcctgctgaacgacggcatctatcatggcttccgccagccaggttaagtgatcgctcactttcatcaccggtagcgtaccggcgatatccgctgcggcgatgcgtaacagctgcgcctgtttgaactgacgcagcgcctcaagctgttgctcttcgtcatcttccggcacgcgcagcaaatactggcgcaactcatcgcggtaggcatcggtcgccgtcggctggtaaagggtgtttggatcgagcaattcatccagcaataatggataacgcgccagctggctggcaatcatcgggctcgcggcacacagagaaatcaaatgtttaagcgccgcggggaattcactgagcaattctaaataggtggtgcgggtaacaatccccaccagcaaggcggtaatgcggctcagcgtaacggcagcgtcttcacgcgcacagacatcacttagcagatgcggcatcagatggtcgagcacctgacgtcctcgcggcccgatggtgcgcttatccagctctttgcggaaatcggcaatcagcgttagcacctgtttgcgatcatcctcgctaagatgcgccagcactggcgtagtgtcatcttcctgcaacgcatcctgccacagctcacgccactgttcgctcaggctctcttcctgagtttcactttcatcgtcgccaatcaattcattaaacacccggcgcacattggtcatatgtgcggtcagcgccccggtcagttgcggccagtcagcaaagtccatcgcccacgccagccgcgcacgattaagctcatcagaaggaagcgtctgggtttgttcgtcgttaatgctttgcagcaggttttccagacgccgcaggaacagatacgccactcgcaattgttcagcatcgttttcagaaagcagatgcagctcggcaatggcgctgagcgttggcagtaaagagcggctttgcaggctcggttcgcgtccgccgcgaatgagctggaacacctgaacgataaattcaatttcgcgaatgccgcctgcgccgagtttgatattgtcggtcaaaccacgtcgacgcacttcacgggcaatcatccctttcatgttgcgcaggctctgaatcacgctgaaatcgatgtaacgacggaaaacaaacgggcgcagcatcgcacgcaactcgttagcatagacgccttcgctatcgcccataatccgcgccttgaccatcgcgtaacgctcccagtcgcgcccctgctcctggtaataatcttccaacgcggcaaagctcagcaccagcgggccactttcgccaaacggacgcagccgcatatccacgcgatagacgaagccatcctgcgttggttgatccagcactttaatcagccgctgccccatgcgggtaaaaaactgcgcgttatccagttcccggcgtccaccctgcgtacaaccatgttccggccaggcaaaaatcagatcgatatcagaggagaaattcagctccccaccgcccagcttacccatgcctaaaatcagcagcggttgcgcttcgccctgcgcattgcacggcgttccccactcgcggcagcaggcgtcatacagccagtcacgcgccgcaacaatcagcgtctccgccagatagctgagctgctgcaatatgctctcttcagtaaccagtgccagcgtttgcgcccaggcgatgcgcaccataatgcgccgccggaatagccgcagctcgcgcattaacccggcttcgtcactcacattacagagcgcctcctgcaaccatgccgcgtaatgctgccattcgtcggcctgcggcggttggctttccagttccgtcagccactctggatgcgcaatcacgctgtcctgcacaaaatcactaaaagtaagtacactcttcgcctgtgcgctaagactttcctcggctaaaggctctggcagccgctcaacaacggtctgccagtactgctgtaacggactagagagcggcttcataagcgattttatccttgcctgattaacgttttccgctgtgcaaccagaacggttcctgattgtttgcctcattacggaaatgttcaatttcgatgcgttgcccggtcgcaatagcgtgatgcagcccctgccagttctccagccaggcttgcgcgacgacaggatcatagtaacccgccagcaacagtatactgtcaatatcacgcgtcaggcgtggcaactggtcacggtagcgatcgcctaacggctggcagaaaacgcttttcagttcagcggcatggcgggaaagatggatatcggcaaagcgtttgaaggagtcgctgattttgccctgcgctttggcatctaaaaatggctgccatgctttgcttaccaaccattcggtcaacgccagcttcgccattgccgtttcggtagagtagaccgccgtcacggcagacaccgcagaagcaatggtcgcctcgcattgagtcagcagatcacgtaagtgagtgctcgctttacgcggcacaataccaccgaacagcatcagcgtatgacggaccaggctaatggctgccagcacctgttctttcgccgcatcgttgccgcgtacccacagttcttcatgatactgccattgcgctaacgccagctcgagcgccgcttccagcccctgttccacatcggcttttgccgcaacatgcaaaatggtggtcggtttgatttcacgcgccggattgccctgcgccagatgatagccacgcgccgctttgctcaggctgccctggcgtaatccggtttggcttaccagttggttcgccagtttcagcaccgcgcgcgtgtcgccgctaagcagttccagttccagctcacagataggttcagcaaattcacccgctttcacttccccctggtcgagggcgatttcaatttggctaccatcgaccgccaccagccatttttcgcgataaaaatcggtgctgaacagcggctgcacgcgggaggcgagatcggcgggcaattcgccgttcggccagacttccgtcggtaactgcgccaggtcgagcgtcggttcgctcaacgccacgttatattccgggcgctgatgtaagccgcctgtcactcttcctgcaactttcatggtcatctcatagcgaccgttttcgccacgaatacgtaagcccatatcgtgcccacgcagccagttatccggcgtttcgtagtaaatattcagcaactgcacggggtcatggtgctcgccgcccagcgtattgagatggtcacgcaacgcctcaacggcactgtgattaacaataaactttaattcgatttcctgagccatggcctttacttatcggttatgtcacataagtgacgatgaacggcgaacttaatgcgatcttttttgtcagtagatagtattttgcgccaaattgccatgcaacgggcaatttgacgggcgtaaaagtttgaagcagtggcaagacctgacacagaggattccgattgatgtcgaatgctttgcgtagcgacactgatgccactactatcgttccactttccatgacaataacgacagcctgatgccaaaattacgcctgatcggattaactttactcgcacttagcgcgactgccgtcagtcacgctgaagaaacgcgctatgtttccgacgaactgaatacctgggtccgcagcggtccgggagatcattatcgcctcgtgggcacggttaacgccggcgaggaagtgaccttattacaaactgacgccaacaccaattatgcccaggtgaaagacagctctggccgtaccgcctggatcccgttgaaacaacttagcactgagccaagcctgcgctcccgtgtgccagatctggaaaatcaggtcaaaaccctgaccgataaactcaccaatatcgataacacctggaatcagcgcaccgcagaaatgcagcaaaaagtggcgcagagcgacagcgtgatcaacgggttaaaagaagaaaatcagaaactgaaaaacgagctgattgtcgcgcagaaaaaggtcgatgccgccagcgtacagctggatgacaaacagcgcaccatcatcatgcaatggtttatgtatggcggtggcgtgctggggcttggcttgctgctcggtctggtactgccgcacctgatcccaagccgcaaacgcaaagatcgctggatgaactaaatcgccttcttcgttgcactgtcttattattaggaattgtgtatttgacgaagggatgatggcgtgaagatttatctggtcggtggtgctgttcgggatgcattgttagggctaccggtcaaagacagagattgggtggtggtcggcagtacgccacaggagatgctcgacgcgggctaccagcaggtaggccgcgattttcctgtgtttctgcatccgcaaacgcatgaagagtatgcgctggcacgtaccgaacggaaatccggttccggttacaccggttttacttgctatgccgcaccggatgtcacgctggaagatgatcttaagcgtcgcgatctgaccattaatgcgctggcccaggacgataacggcgagattatcgacccgtacaacggtctgggcgatctgcaaaatcgtctgttgcgccatgtttcccccgcttttggcgaagatccgttacgcgtattgcgcgtggcgcgttttgctgcgcgttatgcccacctcggttttcgtattgccgatgaaactctggcgttgatgcgcgagatgacccatgcgggtgaactggaacacctgacgcctgaacgggtatggaaagagacggaaagcgccctcaccacccgcaatccacaggtgttcttccaggtactgcgcgattgcggcgcactgcgcgttttattcccggaaattgacgcactgtttggcgttccggcccctgccaagtggcatccggaaatcgatacgggtattcataccttaatgacgctcagtatggcggcgatgctgagtccgcaggtcgatgtccgtttcgcaactttatgccacgatctcggtaaagggctgacgccgccagaactctggccgcgtcatcatggtcatggcccggcgggtgttaagttagtggaacaactatgccagcgtctgcgcgtgccaaatgaaattcgcgatttagccagactggtggctgagtttcacgatctcatccacaccttcccaatgctgaacccaaaaaccatcgtcaaattatttgattccatcgatgcctggcgtaaaccgcagcgtgtcgagcaactggcgctgaccagcgaggctgacgtgcgcggcagaaccggttttgaaagtgcggactacccgcaaggccgctggttgcgcgaagcctgggaagtggcgcagagtgtgccgacaaaagccgtcgttgaagcgggatttaaaggtgtggagattcgcgaggagctgacccgacggcggattgcggcggtagccagctggaaggaacaacgttgcccaaagcctgaatgagtattgggcattttgccggatgcggcgtaaacgccttatccggctacatgtcaacgacagttgtaggcctgataagacgcgcaagcgtcgcatcaggcgttgattgccggatgcggcgtgaacgccttattcggcctacgcaatcgttgacaacgccaagcatccgacactattcctcaattaaaagaacacgacatacaccgcagccgccacaataaagcgataaatggcgaacgggataaagctaatgcgcttaatcaattgcaggaaggttttaatcgctatcagcgccaccacaaaagcggtgataaacccaacggcaaacatcgggatatcgccgcttgtcaggaagccccagcttttgtagagatcgagcgccgttgcgcccatcatcatcggcaccgccagcaggaagctaaactcggaagcagcgtaacggctcacccccatcagcatcccaccactaatggtcgccccggaacgggagaaacccggccacagcgccagacactggaaacagccaatcataaatgcctgacgataggtcatatcatcaagacccggcgcacgcggctctttcggcttcaggcattcggcggcaatcagcaacaaaccgccaacgaccagcgcatacatcacatttatcgggttaaacaaactcttaatcgtgtcgtggaacaacagccccaataccaccgccggaatcatccccagcaaaatgtggatcagcgttaaacgacctttgctttcaccttcgtgctgcaacgggcggccaaagtggatgccaatcaggccaaacagacgccgccagaacatcactactaccgccagaatacttcctaactggatcacaacttcaaaggttttcgccgtgtcgccctcaaaccccaacaagtgaccgacaataatcatatggcccgtgctggataccggcagaaattctgtcaatccttcgaccacacccaatattgccgctatcagcaggctgtgcatatcgctcatcaataaacccctaaattattaaaatgtaccgcttgtccgaactactgcgtatgaccaggttataaccgtttggtttaacagctgtaaaattaattattttctttcagattattgccacgctcaatgattacgccaacattcgccgcccgcgccactgcgcctggcttgctgagtttgatacgcacccacgggctgttgaagcgtgctaacagcagctccgccacctcttcagccacgcgttccaccagcgcaaaacgcgccccctcgacgtggctgaccaccgtttctgcaatgtcagcgtaactgaggcaatccgccacatcatcacttttcgccgctttacggttatcccacgccatttcgatatcgaacactaacttctgttcgatggtctgttcccagtcgtaaacaccaatagtggtgattacgctaagttgctctataaatacaatatccatcacgtcctgcctgctttttggctaaccggataccacttccggcgaaatgtgcgtattatccacagattcatcgttgaacacgaattttcaaaacggaacagcttatgagtgcaatcgcgcctggaatgatcctcatcgcgtacctctgcggctccatttccagtgccattctggtttgccgcttgtgtgggctgcccgatccgcgaaccagcggctccggcaatccaggcgcaaccaatgtgttacgtatcggtggcaagggagcagccgtagcagtactgattttcgacgttctgaaaggaatgttgcccgtctggggcgcgtatgaattaggtgtcagccccttctggctaggcttaattgccatcgccgcctgtcttggacacatctggcccgttttcttcggatttaaaggaggaaaaggcgttgctaccgcttttggtgccatcgcacccattggctgggatctcaccggagtaatggcgggaacctggttactgaccgtgctattgagcggatacagcagcctgggagcgattgtcagtgcactgattgctccgttttatgtctggtggtttaagccacaattcaccttcccggttagcatgctctcttgcctgatcctgctgcgtcatcatgacaacatccaacgtctgtggcgtcgtcaggagacaaaaatctggacgaaattcaaaagaaagcgcgaaaaggatcccgagtgatttctggtggatttacatgacctgatagccttcatcgggcttgcccagccgttgctggcaccatgccgccagaaattccacgcagacacgtaatttcatgctgcgatagagcggctcccggtaaacagcccagatattggcgctttgtgcatactctggcaatacttgcaccagtttgccactctccagaaacggcaacacatcccactcggaacgcagcataatccctttgccctccagcgcccattgcagcacaatctcgccgctattggaggaaagatgcccgcttaccttcacgctttttttctcctgaccgttccccaactcccatattccatgggtcatatcgcgctctttggtcaccagacagtcatgacgacttaattcctgtagggattgtggctgcggatatttttgcagatactcaggtgctgcgcataatattcttttattttttgtcaaaagatgcgcaatataataatcaggaatttcgtcattaatacgaatatccagatcaatattatcctgcactaaatcaatttgccgatcgaacaattcaaaatgcacctgtaactcaggataattgcgcatcagttcggtaatagctggcgcaatatggctgcgcccaaaaccaaaactgcaaccaatacgaatcatcccctccgggcgcgttttgatttgcgtgacgtcatcgaccagtcgctgatattgggtgaggatttccaacgcatgttcgtaacaacgttggccactttcagtcagcgccacgccgcgagcggagcggttcagcagcgttgttgccagcgtattttcaaggatttggatccgcttggtgacaaatgcaggcgtctgcccaagcgtcgccgctgcggcgctaaaactcccgctgtgaacgatttctaccagtacctgcaagtctttggctaaaggccagctattcagcatcgttaattatccgcagttgtgataagcgcagtgtatttcgcaaaacattgccattccctgctctggcgcaatattcattcttattttcgcgttgattcacgaactgttaattacatattcacggtggcaaaaaatataaaaccacatttttagtggtagtttgtggcggtgaatttttccagacaaatacaaaaactggagttgccatgatgagcgaaagtaataagcaacaggcagtgaataagttgacagagattgtcgctaactttaccgccatgatttctacccgaatgcctgatgacgtggtggataaactaaaacagctaaaggatgccgaaacgagcagcatggggaaaattatctaccatacgatgttcgacaacatgcaaaaagcgattgacctgaatcgtcctgcctgtcaggacaccggggagattatgttcttcgttaaagtcggttcccgcttcccactgcttggcgagctgcaaagcatactcaaacaagccgtggaagaggcaaccgtcaaagcgccactacgtcacaatgcggtagaaatttttgacgaagtaaacaccggcaaaaataccggtagcggcgtaccgtgggtcacctgggacatcatccccgacaatgacgatgcggaaatcgaagtttacatggcaggcggcggctgcacgctacctggccgcagcaaagtgttaatgccgagtgaaggctacgaaggcgtggtgaaattcgtcttcgaaaatatctccaccctcgccgtaaacgcctgtccaccggtactggtgggcgtgggcatcgccaccagcgtggaaaccgccgccgtactcagccgtaaagccattttgcgcccgattggcagccgccatcccaatccaaaagcggcagaactggagctacgcctggaagaaggactcaaccgtctggggattggtccacaagggctgaccggcaacagtagtgtgatgggcgtacatatcgaatctgccgcccgccatccgagtaccatcggcgttgctgtctctaccggctgctgggcgcatcgtcgcggcacgctgctggttcatgccgatctcacctttgaaaatctgtctcacacccggagcgcgttatgaaaaagatcctgacaaccccgatcaaagctgaagatctgcaagatattcgcgtcggcgatgtgatctacctgaccggtacgctggtgacctgccgcgacgtttgtcaccgccgtttgatcgaactgaaacgtccgatcccttacgatctcaacggcaaagcgattttccacgctggccccatcgtgcgcaaaaacggcgacaaatgggagatggtctccgtcggcccgacaaccagtatgcgtatggaaagttttgaacgtgaatttattgagcagaccggcgtgaaactggtggttggcaaaggtggtatggggccgctgaccgaagaaggctgccagaaattcaaggcgctacatgtgattttcccggcaggctgcgcggtgctggcggcaacccaggtggaagagattgaagaagtgcactggacagagctcggaatgccggagagtctgtgggtctgccgggtcaaagagttcggcccgctgattgtctctattgatacccacggcaacaacctgatagccgaaaacaaaaagctgttcgccgaacgccgcgatcccatcgtggaagagatctgcgagcacgtccattacatcaaataaccctcccggagaggctcacccctctcctttttcgcaggcataacacgatgaaaccttccactgaatggtggcgatatcttgcgccgctggcggtcatcgccattattgctctacttccggttcccgcagggctggagaaccatacctggctctactttgccgtttttactggcgtgatcgttggactgatcctcgaacccgtgccgggtgccgtggtggcgatggtgggtatatccatcatcgccatactctctccctggctgctgttcagcccggagcagctcgctcagccaggctttaaattcactgcaaaatccctcagctgggccgtttccggtttttctaatagcgttatctggctgattttcgccgcctttatgtttggcacaggctatgaaaaaaccgggcttggacgccgcattgcgctgattctggtgaaaaagatgggacatcgcacgctgtttctcggctatgcggtgatgttctccgagctgatcctcgcacctgtaacaccgtccaacagcgcgcgtggtgcggggattatctatcccatcatccgtaacctgccaccgctctatcaaagtcaaccaaacgacagcagtagccgcagcattggcagctacatcatgtggatggggattgttgccgactgcgtgaccagcgccattttcttgacggcgatggcaccaaacttgctgttaattggactgatgaaaagcgcatctcacgccacgctgagttggggcgactggttcctcgggatgttgccgctcagcattttactggttctgctggttccctggctggcttacgtgctgtacccgccggtactgaagtctggcgatcaggtgccgcgctgggcagagacggaactgcaggcaatgggcccgctctgtagccgtgaaaaacggatgctggggctgatggtaggcgcgctggtgctgtggattttcggcggtgattatatcgatgccgcgatggtcggttacagcgtggtggcactgatgctgcttctgcgcattatcagttgggacgacattgtcagtaataaagcggcgtggaacgttttcttctggctggccagccttatcaccctcgccaccggactcaacaacaccggttttattagctggtttggcaaactgttagcaggcagcttaagcggttatagcccaacgatggtgatggtggcgttgattgtggtgttttatctactgcgctactttttcgccagcgccacggcgtatacctccgctctcgcaccgatgatgattgctgctgcgctggcgatgccggaaatcccgctgccggtgttctgcctgatggttggtgcggcaattggtctggggagcattcttacaccatacgccaccggccccagtccgatttactacggcagtggttatctgccaacggcggattactggcgactgggggcgatttttgggctgatattcctcgtattgctggtgattaccggcttactgtggatgcccgtggtgttgctttaagtgaggacggtgccggaaattgctctccggcacccaatagttttacgcagccggtaactccgccagcggccagcgcggacgcacgctaacgccgagatccgccgtcgcgcctgctttaaaccgcaccattccggcataggcgatcatcgcgccgttatcagtacaaaattccggacgcgcgtagaacacttcgccgcggcgttttttcatcatttcagccagcttcgcccgtaacgtacggttagcactcacgccgcccgccatgaccagtcgcttaaagcccgtctgacccagcgcccgcttgcacttaatcatcagcgtatcgaccaccgcatcttcaaaggcgcgggcgatatcagcacgcgtctggtcgtcggtgccgttgtcacgaatggtatttgccgcgaaggttttcaggccggagaagctgaaatccagccccggacggtcggtcatcggacgcgggaagacaaagcgcccggcagtaccctgagccgccattttgctcagtaacggcccgccaggataatccagccccagcagcttcgcggttttatcaaacgcttccccggcggcatcatcgatagactcgccgagcagctcgtactgaccaatgccagtcacgctgattaactgcgtatgaccgccggaaacaagcagcgcaacaaacggaaattccggcgggttatcttccagcatcggcgctaacagatgcccttccatatggtgtacagggatcgccggaacgtcccaggcaaacgccagagaacgccccacggtcgcgccaaccagtagcgcgccgactaatccagggcctgcggtataggccacagcatcaatgtcttttgccgttaaaccagactcctttagcgccgcctggatcaacggtacggttttacgcacatgatcgcgggaggccagttcaggcacgacgccgccgtagtcagcgtgcaatttcacctgactatacaattggttggctaacaaacctttttcatcgtcgtaaatggcgatgccggtttcatcgcaggaagtttcaatacccagtacacgcatgacttgttttacctcgctttattaccgcgcagtgtaggaccaatgcgggttgatgtaaaactttgttcgcccctggagaaagcctcgtgtatactcctcacccttataaaagtccctttcaaaaaaggccgcggtgctttacaaagcagcagcaattgcagtaaaattccgcaccattttgaaataagctggcgttgatgccagcggcaaaccgaattaatcaaaggtgagaggcacatgccggtaattaaagtacgtgaaaacgagccgttcgacgtagctctgcgtcgcttcaagcgttcctgcgaaaaagcaggtgttctggcggaagttcgtcgtcgtgagttctatgaaaaaccgactaccgaacgtaagcgcgctaaagcttctgcagtgaaacgtcacgcgaagaaactggctcgcgaaaacgcacgccgcactcgtctgtactaattccccgagagcgttgctctccgatcagaccgagttgtagttgtaaggccgtgcttccgaaaggaatgcgcggcttattttcgtttatgaattgctaaaaatcggggcctatggctggacgaatcccacgcgtattcattaatgatctgctggcacgcactgacatcgtcgatctgatcgatgcccgtgtgaagctgaaaaagcagggcaagaatttccacgcgtgttgtccattccacaacgagaaaaccccgtccttcaccgttaacggtgagaaacagttttaccactgctttggatgtggcgcgcacggcaacgcgatcgacttcctgatgaactacgacaagctcgagttcgtcgaaacggtcgaagagctggcagcaatgcacaatcttgaagtgccatttgaagcaggcagcggccccagccagatcgagcgccatcagaggcaaacgctttatcagttgatggacggtctgaatacgttttaccaacaatctttacaacaacctgttgccacgtctgcgcgccagtatctggaaaaacgcggattaagccacgaggttatcgctcgctttgcgattggttttgcgccccccggctgggacaacgtcctgaagcggtttggcggcaatccagaaaatcgccagagtttgattgatgcggggatgttggtcactaacgatcagggacgcagttacgatcgtttccgcgagcgggtgatgttccccattcgcgataaacgcggtcgggtgattggttttggcgggcgcgtgctgggcaacgatacccccaaatacctgaacagcccggaaacagacattttccataaaggccgccagctttacggtctttatgaagcgcagcaggataacgctgaacccaatcgtctgcttgtggtcgaaggctatatggacgtggtggcgctggcgcaatacggcattaattacgccgttgcgagcttaggtacgagtaccaccgccgatcacatacaactgttgttccgcgcgaccaacaatgtcatttgctgttatgacggcgaccgtgcaggccgcgatgccgcctggcgagcgctggaaacggcgctgccttacatgacagacggccgtcagctacgctttatgtttttgcctgatggcgaagaccctgacacgctagtacgaaaagaaggtaaagaagcgtttgaagcgcggatggagcaggcgatgccactctccgcatttctgtttaacagtctgatgccgcaagttgatctgagtacccctgacgggcgcgcacgtttgagtacgctggcactaccattgataagccaagtgccgggcgaaacgctgcgaatatatcttcgtcaggaattaggcaacaaattaggcatacttgatgacagccagcttgaacgattaatgccaaaagcggcagagagcggcgtttctcgccctgttccgcagctaaaacgcacgaccatgcgtatacttatagggttgctggtgcaaaatccagaattagcgacgttggtcccgccgcttgagaatctggatgaaaataagctccctggacttggcttattcagagaactggtcaacacttgtctctcccagccaggtctgaccaccgggcaacttttagagcactatcgtggtacaaataatgctgccacccttgaaaaactgagcatgtgggacgatatagcagataagaatattgctgagcaaaccttcaccgacagtctcaaccatatgtttgatagcctgcttgaactgcgccaggaagagttaatcgctcgtgagcgcacgcatggtttaagcaacgaagaacgcctggagctctggacattaaaccaggagctggcgaaaaagtgatttaacggcttaagtgccgaagagcgatcgggaagcccccgacagccgcactgagaggcagcggcaaatatataagtacgccctcgtaattatcgttggcggtaaacaaccgttggatttcagcgttaacggctgaaggacatcgggtcaatcgcccaacaccaacctcatgaaataagtgtggataccgtcttatggagcaaaacccgcagagtcagctgaaacttcttgtcacccgtggtaaggagcaaggctatctgacctatgccgaggtcaatgaccatctgccggaagatatcgtcgatagtgatcagatcgaagacatcatccaaatgatcaacgacatgggcattcaggtgatggaagaagcaccggatgccgatgatctgatgctggctgaaaacaccgcggacgaagatgctgccgaagccgccgcgcaggtgctttccagcgtggaatctgaaatcgggcgcacgactgacccggtacgcatgtacatgcgtgaaatgggcaccgttgaactgttgacccgcgaaggcgaaattgacatcgctaagcgtattgaagacgggatcaaccaggttcaatgctccgttgctgaatatccggaagcgatcacctatctgctggaacagtacgatcgtgttgaagcagaagaagcgcgtctgtccgatctgatcaccggctttgttgacccgaacgcagaagaagatctggcacctaccgccactcacgtcggttctgagctttcccaggaagatctggacgatgacgaagatgaagacgaagaagatggcgatgacgacagcgccgatgatgacaacagcatcgacccggaactggctcgcgaaaaatttgcggaactacgcgctcagtacgttgtaacgcgtgacaccatcaaagcgaaaggtcgcagtcacgctaccgctcaggaagagatcctgaaactgtctgaagtattcaaacagttccgcctggtgccgaagcagtttgactacctggtcaacagcatgcgcgtcatgatggaccgcgttcgtacgcaagaacgtctgatcatgaagctctgcgttgagcagtgcaaaatgccgaagaaaaacttcattaccctgtttaccggcaacgaaaccagcgatacctggttcaacgcggcaattgcgatgaacaagccgtggagcgaaaaactgcacgatgtctctgaagaagtgcatcgcgccctgcaaaaactgcagcagattgaagaagaaaccggcctgaccatcgagcaggttaaagatatcaaccgtcgtatgtccatcggtgaagcgaaagcccgccgtgcgaagaaagagatggttgaagcgaacttacgtctggttatttctatcgctaagaaatacaccaaccgtggcttgcagttccttgacctgattcaggaaggcaacatcggtctgatgaaagcggttgataaattcgaataccgccgtggttacaagttctccacctacgcaacctggtggatccgtcaggcgatcacccgctctatcgcggatcaggcgcgcaccatccgtattccggtgcatatgattgagaccatcaacaagctcaaccgtatttctcgccagatgctgcaagagatgggccgtgaaccgacgccggaagaactggctgaacgtatgctgatgccggaagacaagatccgcaaagtgctgaagatcgccaaagagccaatctccatggaaacgccgatcggtgatgatgaagatagccatctgggggatttcatcgaggataccaccctcgagctgccgctggattctgcgaccaccgaaagcctgcgtgcggcaacgcacgacgtgctggctggcctgaccgcgcgtgaagcaaaagttctgcgtatgcgtttcggtatcgatatgaacaccgactacacgctggaagaagtgggtaaacagttcgacgttacccgcgaacgtatccgtcagatcgaagcgaaggcgctgcgcaaactgcgtcacccgagccgttctgaagtgctgcgtagcttcctggacgattaatcggtaggccggatcaggcgttacgccgcacccggcactaggccctctgcacaaacgccaccttttcggtggcgttttttatcgcccacgcactaccagcgcctggtccagctcgcgatacgcttcaaccagtttctccagactaacgcgacttaaaccgctgggatttggcagcacccaaatctgcgtgctaccaatggtgagcgtttgtttcccccactgtgcaccgcgctggctgaatccctgttcatatgcttgtttgcccagaatcgccaacgcctgcggctgataatcttcaattttttcaatcagcttacgcccgcctgcgtgtagctcctgcttactaacttcattggcttgcaccgttggacggtctaccagtttggtgacgccacaacgataatccagcagatgctgtgcctcctgcggcttcaactgacggtcggtaaacccggcctgatatatcaccttccagaagcgatttgccggatgagcaaagggaaaaccagtcccggcggaactaagcccagggttgataccgcaaaacacgacccgtaaccctggagccaaaatatcctcaaccatatttactcctttctaacatcaccaggaaaagtataacggattgaaaatacattgtttataaaaacagcaggcgcgcggtaatggctggattgcgacacggagttactttataatccgctaccatggccccttagctcagtggttagagcaggcgactcataatcgcttggtcgctggttcaagtccagcaggggccaccagatatagcaaaggctgacgagaaatcgtcagcctttttctttttatatatcagttactttgcgtgccagtaagccgctgcacgtacccgctgtgggtcatactgttccgcttcaaagcggcggcttaaattcttaacgactttaccttcgccggttatccagatgaagtaatcatcggcagggatttgcatctgcgccagacgcgcatctaccgcctgctcatcatgtgccagccattcgatattaaaaccatcaaggtgcgcgagataatcctgacaggcgttatcccgcacgctaaccagcgcactaacttgcggtttaacggcaagtttgctcaacgtttccaggcggcggcgcaatgcaggcattccggattcatcgcagacatacagctgatacgcgtaatcttccggcaccaccaggctaccgcgcggacctgccaccgtaagtttatcgcccggttgcgcctgcatcgcccagccgctggcgaccccaccgtcgtgaataaagaaatcaatcgccagttcatggcgtagttcgtcatacagcggcgtatagtcacggctcggtgggcgtggtccttccggccagacgatgccctcttccgttaccgttggcggcacaaagtgagcgtcaggttgaggaaagaagagtttgctgtgatcgtcaaagccacggcttgtaaaaccgtccagcgcctcgccgccgaggacaatgcgctgaaaaccggcgctgatgcgctcaacgcgtaacacagtcagttcacggaagcgcagatcattgcgaacgcgctgcgggtagcggggggtgttattcattgttatcgccttcgtgatggtaatcagatatatctaaataaaactcgcaaatgataatgattgttaatcatgataaatgcaagcgatttgtagaactgatatgtctatagtctgataagacgaaccgcctcttctcaggcatcattactcaacgccggatgcggcgtgaacgccttatccggcctacgtgtgagatgagtccacgtttaaaaatcatttttacacttgcaagaacgctcatatcagatataaattagatatatctaattaagcaaaaggaggctgatatgagccatcatcacgaagggtgttgtaaacatgaaggccagccacgccatgagggctgctgcaaaggtgagaagagtgaacacgagcactgcggacacggtcaccagcatgaacacggtcaatgctgcggtggtcgccacggtcgcggcggcggtcgtcggcaacgtttctttggtcacggtgaattacgtctggtgattctggatattctcagccgcgatgacagccacggttacgaattgattaaagcgattgagaatctaacccaggggaattacaccccaagcccgggcgtcatctacccaacgctggattttctgcaggagcagagcctgattaccatccgcgaagaggaaggaggtaagaagcagattgcgctgaccgaacaaggcgcgcagtggctggaagaaaaccgcgaacaggtggagatgattgaagaacgcatcaaagcgcgttgcgttggcgcggcgctgcgccagaacccgcaaatgaagcgggcgctggataattttaaagcggtgctggatttacgcgtcaaccagagcgatatcagtgatgcacaaataaaaaagatcattgcggtgatcgaccgcgccgcttttgatattacgcaactggattaatcgccgcatccgccagtggcgcggtgcaattgccggatgcgacgcttgacgcgccttatccggcctacacccgctacacaccccgcaggcctgataagatgcgccagcatcgcatcaggcattgtgctccaaccgccggatccggcataccgattaatgcagtaccgtcaccgcgtcttccagtcggctggcgcggtgtttcaccatcgcgctcacctgcgcactctcttccaccagctcggcatttttctgggtgatcaggttaagctcatccactgcacgggtcaggctggaaagcccatcggcctgttccagcgtactatggctaatctgggcgatcaactgggtgacgtttttcacctgtgccacaatatcttccatcgtccgtccggcggcgtgtacctgctggctaccggattgcaccttatcagcactggcatcaatcagcttgcgaatatcgttggcagcattagcgctgcggctggctaaatgacgcacttcccctgccaccactgcaaaacctttgccctgttcgccggcacgcgccgcttccaccgccgcattcagggccagaatattggtctgaaacgcaatatcgttaatcaggctagtaatggtgccaatgcgctgggtactgtcggcgatatcgtccattgtcttgatcaccgtggtcatcgcctccccaccctgcactgccgcattactggcagtgatactcagtttatcggcagcgctcgccgtggcagagttctgtttcacgctcgccgccatttggttcatggtcgccaccgtttgctgaacgttatcaactgtctgctgggtatgttcgttcagttcatcggtgcctttcgccagcgtctcactgccatttctgacactggacacctggctactgacatcgttaattagccaacggcacatcaggccaagttgccctaccgcacgtaatgtcagccccagctcatcgctgcgattcagatgctcaacactattacgttctccggtcgccaccttcagtgcctgatgggcaacattttctatcgggcgcacaatctgccattcaaaacaggcgcttgccaacaataccactaacgcacagaggatatacgtcaccaccggggcagcaacaaaccaaagcatggccgccagcaagataaacatcagggtcatcactccacgcgcccgccagcgaagcggtaaactaggcagtttacccagccagcctttacgcaccaccaggcctttatgaatacgcttactggtacgtccggcgttcaacgctttgtacagcggctccaccgccgcgatctcttcatccgtcgcccgggtacgaatgctcatatagccactgatttttccctcgcgcaccatcggtaccgcattggcccgcacccaataatggtcaccatttttgcggcgatttttcacgatgccgctccagggctccccttttttcagggtgaaccacatatccgcaaacgccgcttttggcatatccgggtgacgcaccatgttgtgcggctgcccttgtaactcttgcaaggtatagccgctcacctgcacaaaagtgtcattagcatgagtgatatagctttgcagatcggtagtggacatcagagtggtatcgtccgccagcggggtattttgctgggtgacatacggatgagaagacatgttcgcgtcctgtgcaggttatatggttgttaacttcttgtcagagtttatgtcggccccgctgcggttatctttaaccgattaatttgatttagatcgcaatttgcgatttaaacacaaatctaattccttgatttaaaatactttcactctgttactatacgaaaacgttaattatcttgcccaaaaatcaggcaattattgccctgaaaacgtgcatttgcgcagcaatcatcaaatccatacccgacaaaaaccgtgcaaaataacaacaaatgttaacagatagcattaaatattgcacaaatgataaccgaatttgtgtttatcccgattttcgcgatcgcagccggagtggcgcaatccctgcaatacttaaatcggtatcatgtgatacgcgagcctccggagcatattttgaacaggttacctagcagcgcaagcgctttagcgtgcagcgcccacgccctgaatctcattgagaagcgaacgctggatcatgaggagatgaaagcacttaaccgagaggtgattgaatacttcaaagagcatgtcaatccggggtttttagagtatcgcaaatctgttaccgccggcggggattacggagccgtagagtggcaagcgggaagtttaaatacgcttgtcgacacccagggccaggagtttatcgactgcctgggaggttttggaattttcaacgtggggcaccgtaatccagttgtggtttccgccgtacagaatcaacttgcgaaacaaccgctgcacagccaggagctgctcgatccgttacgggcgatgttggcgaaaacccttgctgcgctaacgcccggtaaactgaaatacagcttcttctgtaatagcggcaccgagtccgttgaagcagcgctgaagctggcgaaagcttaccagagtccgcgcggcaagtttacttttattgccaccagcggcgcgttccacggtaaaagtcttggcgcgctgagcgccacggcgaaaagcaccttccgcaaaccgtttatgccgttactgccgggcttccgtcatgtgccgtttggcaatatcgaagccatgcgcacggctcttaacgagtgcaaaaaaaccggtgatgatgtggctgcggtgatcctcgaaccgattcagggtgaaggtggcgtaattctgccgccgccgggctatctcaccgccgtacgtaagctatgcgatgagttcggcgcactgatgatcctcgatgaagtacaaacgggcatggggcgcacgggcaagatgttcgcctgcgagcatgagaacgtacagccggatatcctctgccttgccaaagcgctcggcggcggcgtgatgccgattggcgcgaccatcgccactgaagaggtgtttagtgttctgttcgacaacccattcctgcataccaccacctttggcggcaacccgctggcctgtgcggcggcgctggcgaccatcaatgtgttgctggagcagaacttaccggctcaggctgagcaaaaaggcgatatgttgctggacggtttccgtcaactggcgcgggaatatcccgatctggtacaggaagcgcgtggtaaagggatgttgatggcgattgagtttgttgataacgaaatcggctataactttgccagcgagatgttccgccagcgcgtactggtggccggaacgctcaataacgccaaaacgatccgcattgaaccgccactgacactgaccattgaacagtgtgaactggtgatcaaagcggcgcgtaaggcgctggcggccatgcgagtaagtgtcgaagaagcgtaatatcaaatcggatggcgatacgacgtcgccatccgatctttttatacgacgcgtacgcccgcaggcatcatccgctccggcgttaacagcacgctttcactgccgtcatcggtttccgcacacaacagcatgcattcgctcgtttcaccacgcattttcgctttttgcagattgcataagaccaccaccgttttccccatcagctcttcttcgctgtagtacggcaccaggctggtcacggtttgcagcgttttttgccccacatcaacctgtacgatgtacagcttgtcggcgttttcatggcgtttcacttccacaatctttccgacgcgcatttccagacgtgcaaaatcagcgtaagccacggtttccattgcttcctcccttagggtaaaattttactaaactatagcaaaagtttttctcaatcctgtaggctaaaaatggagaatgcaggcgtgatcacattcgtgagccgctgtgttaccgttacagcgtcaaagaaacgcgctttatttactgaaaacaggtgacccgataagcacttcctctacaatgggggcgcacatcagggaaagtaaaaaaggtaaacatggcaacactaaaagacatcgcaatcgaagctggcgtatccctggcgacagtatccagggtcttaaatgacgatccgacattgaatgtgaaagaagagacgaaacatcgcattctcgagatcgccgaaaagctggagtacaagaccagtagtgcccgtaaactccagacaggtgcagtcaaccaacaccatattctggctatctacagctaccagcaggagctggagatcaacgatccttactatctggcgatccgccacggcattgaaacccagtgcgaaaagctgggcatcgagctcaccaactgttatgaacacagcggcttaccagacattaaaaacgtcaccggtattttaattgtcggcaaacccacgcccgccctgcgcgccgctgccagcgcgttgaccgacaatatctgttttatcgactttcacgaacccggcagcggttacgatgcggtggatatcgatctggcacgcatcagtaaagaaatcatcgacttctatatcaaccagggcgttaatcgtattggttttattggcggtgaagatgagcctggcaaggcggatattcgtgaggtcgcctttgcggaatatggccgactgaaacaagtggtacgcgaagaggatatctggcgcggcggtttttccagtagcagcggttatgaactggcaaaacaaatgctggcgcgggaagactatccgaaggcactgtttgttgcttccgattccattgctatcggcgtactgcgggcaattcatgaacgaggcctgaacatcccacaggatattagccttatcagcgttaacgatatccccaccgcgcgatttacctttccgccgctctccaccgtgcgcatccattccgagatgatgggaagtcagggcgttaacctggtgtatgaaaaagcccgcgatggtcgcgcgctgccgctgttagtcttcgttcccagcaaattaaaactgcgcggcacgacccgttaaatccccttacacactgtccggcaatcgtttttgccggacagtgctgccgtttattttcgtgatccagttaaagtaaatgcatttacctgctactttttagtaaaaattttactaaactccccagcaattacacaaactaccatcaccatgaatggttccgatttctctctaccgggaggccctatgaatcgctgggaaaacattcagctcacccacgaaaaccgacttgcgccgcgtgcgtacttttttagttatgattctgttgcgcaagcgcgtacctttgcccgcgaaaccagcagcctgtttctgcccttaagcggtcagtggaatttccacttttttgaccatccgctgcaagtaccagaagccttcacctctgagttaatggctgactgggggcatattaccgtccccgccatgtggcaaatggaaggtcacggcaaactgcaatataccgacgaaggttttccgttccccatcgatgtgccgtttgtccccagcgataacccaaccggtgcctatcaacgtattttcaccctcagcgacggctggcagggtaaacagacgctgattaaatttgacggcgtcgaaacctattttgaagtctatgttaacggtcagtatgtgggtttcagcaagggcagtcgcctgaccgcagagtttgacatcagcgcgatggttaaaaccggcgacaacctgttgtgtgtgcgcgtgatgcagtgggcggactctacctacgtggaagaccaggatatgtggtggagtgcggggatcttccgcgatgtttatctggtcggaaaacacctaacgcatattaacgatttcactgtgcgtaccgactttgacgaagcctattgcgatgccacgctttcctgcgaagtggtgctggaaaatctcgccgcctcccctgtcgtcacgacgctggaatataccctgtttgatggcgaacgcgtggtgcacagcagcgccattgatcatttggcaattgaaaaactgaccagcgccagctttgcttttactgtcgaacagccgcagcaatggagtgcagaatccccttatctttaccatctggtcatgacgctgaaagacgccaacggcaacgttctggaagtggtgccacaacgcgttggcttccgtgatatcaaagtgcgcgacggtctgttctggatcaataaccgttatgtgatgctgcacggcgtcaaccgtcacgacaacgatcatcgcaaaggccgcgccgttggaatggatcgcgtcgagaaagatctccagttgatgaagcagcacaatatcaactccgtgcgtaccgctcactacccgaacgatccgcgtttttacgaactgtgtgatatctacggcctgtttgtgatggcggaaaccgacgtcgaaagccacggctttgctaatgtcggcgatattagccgtattaccgacgatccgcagtgggaaaaagtctacgtcgagcgcattgttcgccatatccacgcgcagaaaaaccatccgagcatcatcatctggagcctgggcaatgaatccggctatggctgtaacatccgcgcgatgtaccatgcggcgaaagcgctggatgacacgcgactggtgcattacgaagaagatcgcgatgctgaagtggtcgatattatttccaccatgtacacccgcgtgccgctgatgaatgagtttggtgaatacccgcatccgaagccgcgcatcatctgtgaatatgctcatgcgatggggaacggaccgggcgggctgacggagtaccagaacgtcttctataagcacgattgcattcagggtcattatgtctgggagtggtgcgaccacgggatccaggcacaggacgaccacggcaatgtctggtataaattcggcggcgactacggcgactatcccaacaactataacttctgtcttgatggtttgatctattccgatcagacgccgggaccgggcctgaaagagtacaaacaggttatcgcgccggtaaaaatccacgcgcgggatctgactcgcggcgagttgaaagtcgaaaataaactgtggtttaccacgcttgatgactacaccctgcacgcagaggtgcgcgccgaaggtgaaacgctcgcgacgcagcagattaaactgcgcgacgttgcgccgaacagcgaagcccccttgcagatcacgctgccgcagctggacgcccgcgaagcgttcctcaacattacggtgaccaaagattcccgcacccgctacagcgaagccggacaccctatcgccacttatcagttcccgctgaaggaaaacaccgcgcagccagtgcctttcgcaccaaataatgcgcgtccgctgacgctggaagacgatcgtttgagctgcaccgttcgcggctacaacttcgcgatcaccttcagtaaaatgagtggcaaaccgacatcctggcaggtgaatggcgaaagcctgctgactcgcgagccaaagatcaacttcttcaagccgatgatcgacaaccacaagcaggagtacgaagggctgtggcaaccgaatcatttgcagatcatgcaggaacatctgcgcgactttgccgtagaacagagcgatggtgaagtgctgatcatcagccgcacagttattgccccgccggtgtttgacttcgggatgcgctgcacctacatctggcgcatcgctgccgatggccaggttaacgtggcgctttccggcgagcgttacggcgactatccgcacatcattccgtgcatcggtttcaccatgggaattaacggcgaatacgatcaggtggcgtattacggtcgtggaccgggcgaaaactacgccgacagccagcaggctaacatcatcgatatctggcgcagcaccgtcgatgccatgttcgagaactatcccttcccgcagaacaacggtaaccgtcagcatgtccgctggacggcactgactaaccgccacggtaacggtctgctggtggttccgcagcgcccaattaacttcagcgcctggcactatacccaggaaaacatccacgctgcccagcactgtaacgagctgcagcgcagtgatgacatcaccctgaacctcgatcaccagctgcttggcctcggctccaactcctggggcagcgaggtgctggactcctggcgcgtctggttccgtgacttcagctacggctttacgttgctgccggtttctggcggagaagctaccgcgcaaagcctggcgagctatgagttcggcgcagggttcttttccacgaatttgcacagcgagaataagcaatgaggatcatcgataacttagaacagttccgccagatttacgcctctggcaagaagtggcaacgctgcgttgaagcgattgaaaatatcgacaacattcagcctggcgtcgcccactccatcggtgacagtttgacttaccgcgtggagacagactccgcgaccgatgcgctatttaccgggcatcgacgctattttgaagtgcattactacctgcaagggcagcaaaaaattgaatatgcgccgaaagagacattacaggtagtggaatattatcgtgatgaaactgaccgtgaatatttaaaaggctgcggagaaaccgttgaggtccacgaagggcaaatcgttatttgcgatatccatgaagcgtatcggtttatctgcaataacgcggtcaaaaaagtggttctcaaagtcaccatcgaagatggttatttccataacaaataacaactacggcggcaaaaggagtttgccgccaccgctaccctactcattttcggagatgtgttatgtctgataccaaacgtaatacaatcggcaaattcggcttgctcagcctgacttttgccgccgtttacagctttaacaacgttatcaataataatattgagcttggactggccagcgcaccgatgtttttcctcgcgacgattttttattttattcccttctgtctgatcatcgcagaatttgttagcttaaataaaaacagtgaagccggtgtctacgcgtgggtaaaaagtagcctgggcggacgttgggcatttattactgcctatacctactggttcgtaaacctgttctttttcaccagtctgttgccgcgcgttattgcttatgctagctatgccttcctcggatacgaatatattatgacgccggttgccaccaccattatcagtatggtgctgttcgccttctccacctgggtttccaccaacggggcgaaaatgttggggccaattacctccgtcactagtacgctgatgctgctgttaacgctctcctacattttactggcaggtacggcgctggttggcggcgtacagcctgctgacgccatcaccgttgacgcgatgatcccgaacttcaactgggcgttcctcggcgttaccacctggatctttatggccgcaggtggcgcggagtccgtcgctgtgtacgttaacgacgtcaaaggcggtagcaaaagcttcgttaaagtgatcatcctcgccgggatttttatcggcgtactgtattccgtctccagcgtgctgattaacgtcttcgtcagcagcaaagagttgaaatttaccggcggaagcgtgcaggtattccacggcatggcggcgtattttggtctaccggaagcgttgatgaatcgctttgtcggtctggtgtcctttaccgcgatgttcggttccctgctgatgtggaccgcaacgccggtgaaaattttcttctccgaaatcccggaaggcatctttggtaagaaaaccgtcgaactgaacgaaaacggcgttccggcgcgcgcagcgtggatccagttcctgatcgtcatcccgctgatgattatcccgatgctcggttccaataccgtgcaggatctgatgaatactattattaatatgaccgccgcagcgtccatgcttccgccgttattcatcatgctggcttacctgaatttacgcgccaaattagatcacctgccacgcgatttccgtatgggctcccgccgcaccggtattatcgttgttagtatgctgattgcgatatttgccgtagggtttgtcgctagcacattcccgactggcgcgaatattctgaccatcattttttataacgtcggcggtattgttatcttccttggctttgcgtggtggaaatacagtaaatatataaagggattaacggctgaagagcgccatattgaagcgacgccagccagcaatgttgattaagcagaataataaaaaatgagcaggcattttccctcttcctggatgaggagagggaaaatagtttctgcctttatatttttataattacaacgataaaaggctgtactttttctttagctcatggattaacacaatgaaattaatcactgcaccatgcagagcattacttgctctgccgttttgctacgccttttctgcggcaggagaagaagcacgtccggcagaacatgacgacacaaaaacacccgcaattaccagcacatcttctcctagttttcgtttttacggcgaattaggggttggtggatatatggatttagagggtgagaataaacataaatacagcgacggtacctatattgaaggtggcctggagatgaagtacggctcctggttcggcctgatttacggcgaaggctggaccgtgcaggccgaccacgacggcaatgcctgggtgccagaccatagctggggtggtttcgagggcggaattaaccgtttctatggcggttatcgtaccaatgatggcaccgaaatcatgctcagtctgcgtcaggattccagcctggatgacctgcaatggtggggcgatttcacccccgatctgggctacgtcattcccaatacccgcgacattatgactgcgctgaaggtacagaacttaagcggcaactttcgttatagcgtcaccgcgactcctgccggacatcatgatgaaagcaaagcctggctacattttggcaaatacgatcgctatgacgacaaatacacctatccggcaatgatgaacggttacatccagtatgaccttgccgaaggcatcacctggatgaacggtctggaaatcaccgacggcacaggacagctctatctcacgggcctgctaactcctaactttgccgctcgcgcctggcaccataccggacgcgccgacgggctggacgtaccgggaagtgaaagtgggatgatggtgagcgccatgtatgaagcgttaaagggcgtttatctctccaccgcttacacctacgccaaacatcgccctgaccacgctgacgatgaaaccacctctttcatgcagtttggtatctggtacgaatacggcggcggacgtttcgccacggcttttgatagccgcttctacatgaaaaatgcctctcacgatcccagcgaccaaatcttcctgatgcaatatttctactggtaataaggactgtaatttcatgaaaataaaaactattttaacgccagtaacctgcgctctgctgataagtttttccgcccatgccgctaacgccgacaattataaaaacgtgattaaccgtactggcgcgccgcagtacatgaaggattacgattacgacgatcaccagcgttttaatccgtttttcgatctcggagcctggcatggtcatctgttgccagacggccctaacaccatgggcggctttccgggcgttgcgctgctgacggaagagtacatcaactttatggccagcaatttcgaccgcctgaccgtctggcaggacggcaagaaagtcgactttacgctggaggcatacagtattcccggtgcgctggtgcaaaaactgacagcaaaagatgtgcaagtcgaaatgactctgcgcttcgccacgccgcgcacgagtctactggaaaccaaaatcaccagcaataaaccgctggatctggtgtgggacggcgaactgctggaaaaactggaagcgaaagaagggaaaccgctttccgataaaaccattgctggcgaataccctgactatcagcgcaaaatcagcgccacccgtgatggcctgaaagtcacctttggcaaagtgcgcgccacctgggatctgctgacctccggcgaaagcgaatatcaggtgcataaatccctgccggtgcagactgaaatcaacggtaatcgctttaccagtaaggcgcatatcaacggtagcaccacgctctacaccacctattcccatctgctgaccgctcaggaagttagcaaagagcaaatgcagatccgcgatattctggcgcgtccggcgttttatctcaccgccagccagcaacgctgggaagaatacctgaagaaagggttaaccaatccggatgcgacgccggaacagacgcgcgtcgcggtgaaagcgatcgaaacgctcaacggtaactggcgcagtccgggcggtgcggtgaaatttaacaccgttacaccgagcgtgaccgggcgctggttctccggcaatcagacctggccgtgggatacctggaagcaggcgtttgcgatggcgcatttcaatccggacatcgccaaagagaatatccgcgcggtcttctcctggcagatccagcctggcgatagcgtgcgtccgcaggatgtgggctttgtccccgacctgatagcgtggaaccttagccccgagcgtggtggcgatggcggcaactggaacgaacgtaataccaaacccagccttgccgcctggagcgtgatggaagtgtataacgtcacccaagataaaacctgggtggcagagatgtacccgaaactggtggcctatcacgactggtggttacgtaaccgcgatcacaacggcaacggcgtgccggaatatggcgcgacccgcgacaaagcccacaacactgagagcggcgagatgctgtttacggtgaaaaaaggcgataaagaagagacgcagtctgggctgaacaactacgcccgcgtggtggagaaaggccagtacgacagtctggaaattccggcacaggttgctgcaagctgggaaagcgggcgtgatgatgccgccgtctttgggtttatcgacaaagaacagttggataaatatgtcgctaatggcggcaaacgtagcgactggacggtgaaattcgccgaaaaccgcagtcaggacggaacgttgctgggctacagcctattgcaggagagcgtggatcaggccagctatatgtacagcgataaccattatctggcggagatggcaaccatcctcggtaagccagaagaggccaaacgctatcgccagttggcacagcagctcgcggactacatcaacacctgtatgttcgacccgactacccagttctactatgacgtacgtattgaagataaaccactggcgaacggctgcgcgggcaaaccgattgttgagcgcggtaaagggccggaaggctggagcccgctgtttaacggtgcggcaacgcaggccaatgccgacgcggtggtgaaggtgatgctcgatcctaaagagttcaacacctttgtcccgctgggaacggcggcgttaaccaatccggcttttggcgctgatatctactggcgtgggcgcgtatgggtggatcagttctggtttggtctgaaagggatggagcgttacggttatcgtgatgatgccctgaagctggcggatacgttcttccggcacgccaaagggttaaccgccgatggaccaattcaggaaaattacaacccgctgacaggcgcacagcaaggcgcaccaaatttctcctggagtgccgcgcatttgtatatgttgtataacgattttttccgtaagcaataatttgcaactgctggcggatgcggcgtaaacgccttatccgccctacatgtgcaatcctcctggccggataaaacgcggcaagcgttgcatccggcaactgcaccgcgccactggcggatgcggcgtgaacgccttatccgccctacatgtgtgttcccgtaggtcggataagacgcgacaagcgtcgcatccggcatctgcaccgcgccactggcggatgcggcgtggacgccttatccgccctacatgtgcaattccgtaacctggataaaacgcgacaagcgtcgcatccggcgttatcaccgggcgtattctttttgaatcccatcacaaaccccgcactccccttttcccttttctccggcgacggctaaattagaactcatccgaccacataacaattattttacatactggacaattttatgagctacccgagcctgttcgccccgctggatttaggttttaccacgttaaaaaaccgcgtgttgatgggcagtatgcacaccgggctggaggaatacccggacggtgccgagcggctggcagcgttttatgccgaacgcgcccgtcacggcgtggcgctgattgtcagcggcggcattgcaccagatttaacaggcgttggcatggaaggtggcgcaatgctcaacgacgccagccagatcccacaccatcgcaccattaccgaagcggtacatcaggaaggcggcaaaatagccctgcaaattttgcataccgggcgctacagctaccaaccgcatctggtcgccccgtccgcattgcaggcccccatcaaccgtttcgtgccccatgagttaagccatgaagagatcctgcaactgatcgacaatttcgcccgctgcgcgcaactggcgcgggaggcaggatacgacggtgtagaggtgatgggttccgaagggtatttgatcaacgaatttctgacgctgcgcaccaatcagcgtagtgaccagtggggcggcgattaccgcaaccggatgcgatttgccgtagaagtagtgcgtgcggtgcgcgaacgcgtcggcaacgacttcattattatctaccgactgagcatgctcgacctggtcgaagacggcgggacttttgccgaaacggtagagctggcgcaggccattgaagcggcgggcgcgaccattatcaacaccggcattggctggcatgaagcacgtattccgaccattgccacgcccgtgccgcgcggcgcatttagctgggtcacgcgcaaactgaaaggccacgtcagcctgccgctggtaaccaccaaccggattaacgatccgcaggttgccgacgatattctcagccgcggcgatgccgatatggtaagcatggcgcgaccgtttcttgctgatgcggagctgctgagtaaagcgcaaagcggacgagccgatgagatcaacacttgtattggctgcaatcaggcctgtctcgatcaaatcttcgttggcaaagtcaccagctgcctggtgaatcctcgcgcctgccacgaaaccaaaatgccaatccttcccgccgtgcagaaaaaaaatctggcggtggtcggtgcgggacctgctgggctggcgtttgccattaacgcggcggcgcgtgggcatcaggtaacattgtttgacgctcatagcgagattggcgggcagtttaatatcgccaaacagatccccggcaaagaggagttttacgaaacgctgcgctattaccgccggatgatcgaagtgacgggcgtgacgctaaaactcaatcacaccgtgacggcggatcagttacaggctttcgatgaaacgatcctcgccagtgggatcgtgccgcgcactccgcccatcgacgggatcgatcatccgaaggtattgagttatctcgatgtactgcgcgacaaagcgccggttggcaacaaagttgccatcatcggttgtggcgggattggttttgatacggcgatgtatttaagtcagccgggcgaatccaccagccagaatatcgccgggttctgtaatgaatgggggatcgacagtagcctacaacaggctggtggcttaagcccgcagggaatgcagatcccccgtagcccacggcagattgtgatgctccagcgcaaagccagcaaaccaggacaggggttaggcaaaaccaccggctggatccatcgcaccaccctgctcagccggggtgtgaaaatgatcccaggcgtaagttatcagaagattgacgatgacgggctgcatgtggtgatcaacggcgaaacgcaggtattagcagtggacaatgtggtgatctgcgcagggcaagagccaaaccgcgcgctggcgcaaccgctgattgatagcgggaaaacggtgcatttaattggcggctgcgatgtggctatggagctggacgcacgacgggcaattgcccagggaacacggctggcgctggagatttaaatcgttatttgaagcgccggatgcaacgcatccggcacgtcgcgttaatcaataaacaaggcgggagaaatgccgaatcgcgttgccaattttttagcgtgttccagcgttaatttcctcttcccgctcaaaacgcgactcaccatagatttactgccaatttccggcagatcggaaagggttaaaccatattgatccataagggtacgaatcacggctataccgccaggcatggcttgagccatggcattaaattccgcaaattcgggcgcactttcttcccacgcggttattttggcacacaccagatccagcaaggggttttcaggatcgttgagcagcagatgatctaccagttccagcgcctgggtgtattgttcctcgttctgaatacccgccagaaaaggtgccacagcagttagcttttctcctgcttgcaagatgtcggcaatcgcaatcattttttccccttagtacgatgaacagcggtaaagaaatcgtattctttatgcgtcataacttcacgtatgtagcacttttggctttcaaaaaagaccattgctacaacacgtaattcattgcccccaacattgaaaacataatgcttatccagatatttgaagttatccagagatgggaatactgcttttaaactctcaggttttttgaaatatcccttagcaatcgtgttccccagagccaccaactccgttttatgttgcgggtatttttccgcagcatctttcaatgctttttgagttatcaggtgcattcttcatcacgtccgttgacaaattggcaatatgataacatccgttgccagattggcaacggatgaatttatctgtgtgacggaagaataaacgtagaaaaacgctaaacaagagaatgtagacgatggtgacagggattttttgttttatggaagcgcgattccagaactgggcagacattgccggatgcgacgcttgccgcgtcttatccggcctggagtaacgtgctgaacgtaggccggataaggcgtttacgccgcatccggcaggtaactcccaatcttaccgacgacgtcccagcttcaccgctttcagtaccacaaatttattattcgtcgcaatagtggtgcagttgccgaaaatcttcttcagtttatggaagtaatccaggtgacggttggcaacgatatacagctcgccgttgattttcaggcagcggcgggcgtggtggaacatctcccaggcgacgttatcggtcagcgcatgttgttggtgaaacggcgggttgcagagcacagcattaaagcggaaaggctccacgccggagagcgcgttgttgatcataaactcgcagcgatccaacgcctctggcatgttggtttcaacgttcaaacggctggaagcaaccgccatcgggctttcatcgacaaacaccactttcgcctgcgggtttttatcaagcagcgtcagaccaataacgccattaccgcaaccgagatcgacaatctccccttcgagattctctggcagatgttgcataaagaagcgcgcgccgatatcaagcccggtgcgggagaagacattcgcatggttgtggatagtccagtcagtaccttccagcttccagctaacggtctgcggcgcatcggccagctgcggttcattgaaagtgcaattaatcaggcgcgcttttttccatgccagcgtggtggtggttgggccgagcactttttcgaacagttccagcgtggaagtgtgaatgtcacgggccttggcaccggcaataatacgtgtatcgctcgtgaccactttgcgcagcgcacgcagttgctgttccagcaatgccagtgttttcggcactttgatcagcaccacacccggctgttgcgggtagtcggcggtgctgtcgagaaacttcacgctgctctcatcaatcccgttgaggcgtaaattctcgcgcgtcgccagttcactgatgtaactgtcgccaatgctgtacggcttatgttccgccagtgcgcagcttaacgcaccaaaggcatcattcaggatcaacaccgggccgcggatttctgtgtcgtccaactgttgcagcaaatattcatccgccgcttcccacgcctgtagcgggttaacgtcatccgtcgccggaaaacgttgtagtgtcagactacggaaaccgttgtctaagtggctcatcggccctcctgaatgataaaatttcgacattgcccctgaaaagggtgcgtgagtataccctttttctctttttcgtgggcggttatgagcaatcttacttatcttcagggttatcccgagcagctactttcccaggtgcgaacactgattaacgaacagcgtctgggcgatgtgctggcaaaacgctatccgggaacacacgactacgccaccgataaagccctctggcaatatactcaggatctgaaaaatcagtttctgcgtaatgccccgccgatcaataaagtgatgtatgacaataagatccatgtgctaaaaaacgcgctcgggttacataccgctgtttctcgtgtgcagggcggcaagctgaaagcaaaggtggagatccgcgtcgctaccgtgtttcgcaacgcgccggaaccgtttttgcgcatgatcgtggtgcacgagctggcgcacctgaaggagaaagagcataacaaagcgttttaccagttgtgttgtcatatggaaccccagtaccaccagcttgagttcgacacccgactgtggctaacgcagttgagccttgggcagaacaaaatctgaaaatgatgtcaggcgttatcttttctttctttagcgcctaaaatcgacctcccccctttcgttaaggataacgaccatgctgcgcgcatttgcccgccttcttctccgtatttgtttttctcgccggactctaaagattgcctgcttactgttacttgtggcaggagcgaccatccttatcgccgatcgcgtaatggtcaacgccagcaaacagctgacctggagcgatgtcaacgccgttccggcgcgtaacgtgggtttattgctgggggcgaggccgggtaatcgctactttacccgacgtattgataccgcagcagcgttgtaccacgccggaaaagtgaaatggctgctggtaagtggcgataacggacgtaaaaattacgatgaagcaagtggtatgcagcaggctttgatcgctaaaggcgtaccagcaaaagtgatcttctgcgactatgccggattcagtacgctggatagcgtagtgcgtgccaaaaaggtttttggtgaaaaccatatcaccattatcagccaagaatttcataatcaacgcgccatctggctggcaaaacagtacggcatcgacgctatcggttttaacgcgccagacctcaatatgaagcacggtttttatactcaactgcgggagaaactcgctcgtgtcagcgccgtgattgacgccaaaatcctccatcgccagccgaaatatctcgggcctagcgtcatgattgggccgtttagtgagcatggctgtccggcgcagaaataatgcgtatctgcgcacgtcgaagatgaaaaaggcgtgctacattgacgacagaatccctttatggagtatccacgcgttatgatacgtttcgctgtgattggtacgaactggatcactcgccagttcgtcgaggccgcccatgagagcggtaaatacaagttaaccgccgtatattcccgcagccttgaacaggcccagcacttcgccaatgatttttctgtcgagcatctgtttaccagcctggaagcgatggcggaaagcgatgccattgacgcggtgtatattgccagcccgaattccctgcatttttcccagacacaacttttccttagccataaaattaatgtgatttgcgagaaaccgctggcgagcaatctggcggaagtggatgccgccattgcctgtgcgcgggaaaatcaggtggtgctgtttgaggcatttaaaaccgcctgcctgccgaactttcatttgttgcgccaggcgctgccgaaagtcggcaaactgcggaaagtctttttcaactattgccagtattccagccggtatcaacgttacctggatggtgagaatcccaacacctttaatccggcattctctaacggtagtattatggatatcggtttttactgtctggcgagcgcggtggcgttatttggtgagccgaaaagcgtgcaggcaaccgccagtttgctggcaagcggcgttgacgcccagggcgtggtggtgatggattacggtgatttcagcgtcaccttgcagcacagtaaagtcagtgattctgtcctggcgagcgagattcagggcgaagcaggaagcctggtgattgaaaaactgtctgaatgccagaaagtgtgcttcgtgccgcgtggcagccaaatgcaggatctcacccagccgcagcatattaataccatgctctacgaagcagagctgttcgctaccctggtggatgagcatctggtggatcatccagggctggcggtcagtcgcatcaccgccaaactgctgaccgagatccgccgccagactggggtgatttttccggcagatagcgtaaaactataattgccaaagtaaaacagtgtaaaaggtatgtaacagaccattgactggctgaatggtctgtcatactttgttacctgcaaaggggagtaacttcattgccggtcgatcgtcattacgatgtgtgaaaaaacacatccggtcaccgggcaacccgaaaggaatacgcagacgtattccttttttgttgtaagtgagaccttgccggaaggcgaggtctatgcataaaaagcagcggctgacgtcttccgacgttggccgtttttttatgtgtaaggaacttctatgaatactgtcggcacgccgttgctatggggcggattcgctgttgttgtcgccattatgctggctatcgacctgttgttgcaggggcgtcgtggggcacatgccatgaccatgaaacaggctgcggcctggagcctggtctgggtgacgctgagcttactgtttaacgccgctttctggtggtatctggtgcaaaccgaaggtcgcgccgttgccgatccacaggcactggcctttctcacaggttatctgattgagaaaagcctggcggtcgataacgtctttgtctggctgatgttgttcagctatttctctgttccggcggcattacaacgccgcgtgctggtgtatggcgtgctcggggcgattgttctgcgtaccatcatgatcttcactggcagctggctaattagccagttcgactggatcctgtatatcttcggtgccttcctgctgtttaccggcgtgaagatggcgctcgcccatgaagatgaaagtggcattggcgacaagccgctggtgcgctggctacgcggtcatttgcgcatgaccgacaccatcgacaacgagcatttctttgtgcgtaagaatggattgctgtacgccacaccgctgatgctggtactgattctggtggaattgagcgacgtgattttcgccgtggatagcattccggctatcttcgccgtgaccactgacccgttcattgtgctgaccagtaacctgtttgcgatcctcggcctgcgtgcgatgtatttcctgctggcgggcgtagcagagcgtttcagcatgctcaaatatggcctggcggtgattctggtgtttatcggtatcaagatgctgattgtcgacttctaccatattccaatcgccgtcagcctgggcgtggtgtttggcattctggtgatgacgtttattatcaacgcctgggtgaattatcggcatgataagcagcggggtggataatttttaatctgcctaagccgtgtaccctgtcattaacatgagcaccgttttctccctctcccttccagggagagggtcggggtgagggtaatttttcgcaccgatgctggcctgttcccctcaccctaaccctctccccaaacggggcgaggggactgaccgagtccttttttgatgttgtcatcagtctggaagccgcacgttggctttatttttatgtcaaagaaatgtaaccattaagtttcaaaatatgacctctctttaaaatccagcatttttcgcttcccgaagctgtaactttccttatactcgaccttgcaaacactttgttacatcctgaaagatgcgtcgacagaacgcaccagggatgtgcgacaacacaatgaaaggatcgaaaaatgactacgcaacgtagtccggggctattccggcgtctggctcatggcagcctggtaaaacaaatcctggtcggccttgttctggggattcttctggcatggatcagtaaacccgcggcggaagctgttggtctgttaggtactttgttcgtcggcgcactgaaagccgttgcccccatcctggtgttgatgctggtgatggcatctattgctaaccaccagcacgggcagaaaaccaatatccgccctattttgttcctctatctactgggcaccttctctgctgctctggccgcagtagtcttcagctttgccttcccttctaccctgcatttatccagtagcgcgggtgatattagcccgccgagtggcattgtcgaagtgatgcgcgggctggtaatgagcatggtttccaaccccatcgacgcgctgctgaaaggtaactacatcgggattctggtgtgggcgatcggcctcggcttcgcactgcgtcacggtaacgagaccaccaaaaacctggttaacgatatgagcaatgccgttacctttatggtgaaactggtcattcgcttcgcaccgattggtatttttgggctggtttcttctaccctggcaaccaccggtttctccacactgtggggctacgcgcaactgctggtcgtgctggttggctgtatgttactggtggcgctggtggttaacccattgctggtgtggtggaaaattcgtcgtaacccgttcccgctggtgctgctgtgcctgcgcgaaagcggtgtgtatgccttcttcacccgcagctctgcagcgaacattccggtgaatatggcgctgtgtgaaaagctgaatctggatcgcgatacctattccgtttctattccgctgggagccaccatcaatatggcgggcgcagcaatcactattaccgtgttgacgctggctgcggttaatacgctgggtattccggtcgatctgcccacggcgctgctgttgagcgtggtggcttctctgtgtgcctgtggcgcatccggcgtggcgggggggtctctgctgctgatcccactggcctgtaatatgttcggtattagcaacgatatcgccatgcaggtggttgccgtcggctttatcatcggcgtattgcaggactcttgcgaaaccgcgctgaactctagtactgacgtgctgttcactgcggcagcttgccaggcagaagacgatcgtctggcaaatagcgccctgcgtaattaattgtttaacccctttcgtctacggcggaaggggttttctcaactttaaacggatcaattccccttttctgcatccgccagaaacgaatgatattcaggccattcataagcagaaaactaccctcaatcatcgtgccgcctatgctccccgcccagaagttgtgaatcacccagcaacacgtactaaaccacattacgcagcgcatggtcagccctttacagcagaatagcgcccaggtactgacaatcgtgccgataaccggcaatagttcgacaggatgatggaacttcgcgaggccaattccgccagtcagcacaataaaaatcgccattacccataagctgcgcgtgcgtaaggtaatcaatgtacgaatggcattaaggatggcactggcaccagcgggataggtgcccagaagaaaaaaatgtacgccaataacggcgctatagacgctaagctgctttttgaagcgacgttcgtcacgattgaaaaatgttgtgataccaatcagaaaggcgatgacacccacgccctgggccagccaatacgcggtcatgataaatccttagcaggtatggaaaagcaaacggcgcttcacattatgaaacgccgttttttattaacaactcatttcgactttatagcgttacgccgcttttgaagatcgccagttcgcggaagtcgttacgctcgttacaggtttgcttaccgttggcaaactcaacgatggtgtcgataaattcttccagcaactgcggcatcgctttaccgtggatcaactgacccgcgtcaaagtcgatccagtgttttttcttcgccgccagttcactgttggtggcgattttcaccgtcggcacaaatccaccatacggcgtgccacgaccagtactgaacagcaccatatggcagcccgcacccgccagggcgctggtcgctacggcatcgttacccggcgcacttaacaagttcagccctggcgttttcagacgctcgccgtaacgcagcacgtcaaccacgacgctggaacccgctttctgggtacagccaagacttttgtcttccagcgtggtgataccgcccgctttgttccccgggcttgggttttcatagatcggctgatcatgggcaataaagtactgtttgaagtcgttgaccatggtgaccagtttttcaaacgttgcttcgtcgcggcaatggtccatcagcaactgctctgcgccaaacatctccggcacttcggtcagtacggtagtaccgccgttagcaatcacgtagtcagagaaacgccccagcatcgggttagcagtaataccagaaagaccgtcagaaccaccgcactccagaccaaacttcagttcgctgagtttgcctggctcgcgtttatcgttgcgcatcacgttatacagctgatgcaaatgctcgattccggcttcgatctcatcatcctgctgttggcagatcatgaaatgaacgcgttcaggatcgatatcgcccagcgtttcacggaatgcggcaacctggttgttttcacagcccagaccaatcaccagcactgcgcctgcgttcgggtggcgcaccatgttttgcagcatggtgcgggtattaatgtgatcgtcgcccagctgactgcagccgtaggtgtggctgaagaggaacacgccgtcagtaccttcggcgttgttggtctctttcagaaaacggttctggatctgccgcgcgatgccgttgacacagcccacggttggcaggatccacagctcattacgcaccccgacatcgccgttagcgcgacgatagatctgcacttcacgatctgccgcttgcgcaggcagatcctgaaaatcaggttgatagcgatactgatccagatcgctcagattcgtgcgcgtattgtgggcgtgaacgtgaacacctgccgcaatatccgccaatgcataaccaatcggcaggccatatttgatgacattggccccttttgcgatatccgttaacgcaaatttatgtccacgagcaacatcctggcgcagcgtaacagtctggttatcgacactgacttctgtgccttcagccaaatctgctaaagcgaccgcgacgttatccagcgcatggatcttgatgtattgcatatcaaccccagaccttagttcagttcaatggcgaagtagtcacgcgcattgttaaagcaaatatttttcaccatctcgcccagcaggttgatgtccgccggtgcttcgcccgcttccacccagcgaccgatcatctggcacagaatgcggcggaagtattcgtgacgggtgtaactcaggaagctacggctgtcagtcagcataccgacaaagcggctcagcagaccgagctgcgccagttgggtcatctgacgttccataccgtctttctgatcgttaaaccaccagccggaaccgaactgcattttgcccggcataccttcgccctggaagttaccgatcatggtgcccagcacttcgttatcgcgcgggttcaggcagtacagaatggttttcggcagcaggttttcttcattctgcttgctcagcaacttagacagctcttccgccatcggacggtcgttgatggagtcaaagcctacatccggccccagcagtttgaactgacgcaggttgttattacgcagcgcgccaatgtggtactgctgtacccagccgcgacgtgcatattcggcaccaaggaacaccagtaccgcagttttgaactgcgccacttcgtgctcgctcagggtttcgccagccagacggcgcgccagaatgctgtccagttccgcttcgttcgcttcagcaaacatcaccacatccagcgcgtggtcagacactttacagccgtgagcggcgaagtgatccagacgtttggtcagggcagtttgcaggtcagcaaagcggcgaatgtcggtatcggaaacttcgcccagcttcgccatgtagtcgttaaaggtcgcctgttcgatgttgaaggctttgtccggacgccagctcggcagcactttgatggtgaaagagccgtctttggcgatctctgcgtgatgctccagagaatcgatcgggtcatcggtggtgccgaccattttcacgttcatctgctgcatgatgccgcgcgcggagaagttatcctgcgccagcagttcgttacattcgttccagatttcatcggcagtactcggagaaagcaatttgccagtgataccaaacggacggcgcagttcgaggtgcgtccagtggtataacgggttgccgatagtgtgcggaacagtcgccgcccaggcgtcaaatttttcacggtcagacgcatcaccggtacacagacgctcggccacaccgttggtacgcatagcgcgccatttgtagtgatcgcctttcagccagatgtcatacaggtttttaaaacgatagtcttccgcaatctgctgcggcggcaaatggcaatggtaatcgaaaatcggctggtcttttgcgtagtcgtgatacagacggcgggcaaattcggtatctaacaggaaatcttcagtcataaacggagtcattttcgtcttcctctcaacgagtgagctagcttgcttatggtgcgatgctgacaaagttatcacaccaatttccagagtccgaagatattttcgtgagttagatcaataaacgtagttaaaaaaattactctcaaagtggtaaatctcgctgcaggccgcgccagtactggccttgctgtcgtcaggtaatgtccctacaaatattcccacatttgtgatggctctcaccttttaaagttgtatgacaagttatctttctgccgtcgcaaatcataagtcgacggaatgcaaattgccgattcattcatttgttagatgaatcgggttaaccggtacggaagccgaattagcacgaaactttcatggcaacgttcggggcgtgccggttttttttcggttacccggtcgtaactaacatcttcagcctctggcgggatgatggccgcgcttcctgcggatataacaaaacgatgaggttttacatgcgtaaaattaaagggttacgttggtatatgatcgcactggtgacgctcggcaccgtgcttggttacctgacgcgtaacactgtggcggcagctgcgccaactctgatggaagagttaaacatctccacccaacagtattcctatatcatcgcagcctattctgctgcttatacggtcatgcaaccggtagcaggttatgtactggatgtgctgggtacgaaaatcggttatgcaatgtttgctgtgctgtgggccgtgttctgtggtgcaaccgcgctggcaggtagctggggtggcctggctgttgctcgtggtgcggtcggtgccgcggaagcagcgatgatcccggcgggtctgaaagccagctccgaatggttcccggcgaaagagcgttccatcgcagtaggctactttaacgtaggttctagcattggtgcgatgattgcgccgccgctggtggtatgggcaatcgtaatgcacagctggcagatggcatttatcatctccggtgcattgagctttatctgggcgatggcatggctgattttctataaacatccgcgcgaccagaagcatctgaccgatgaagaacgcgactatattattaatggtcaggaagcccagcaccaggtgagcacggcgaagaaaatgtccgttggtcagatcctgcgtaaccgtcagttctggggtatcgcgctgccgcgtttcctggcagaaccggcctggggtacttttaacgcgtggatcccgctgttcatgtttaaagtttacggctttaacctgaaagagatcgcgatgttcgcctggatgccgatgctgtttgctgacctcggttgtatcctcggtggttacctgccgccgctgttccagcgttggtttggtgtgaacctgatcgtttcccgtaagatggtcgtaacgctgggtgcagtgctgatgattggcccgggtatgatcggcctgttcaccaacccgtatgtcgcaattatgctgctgtgtatcggtggttttgcccaccaggcactgtctggcgcgctgattacgctctcttccgatgtgtttggtcgtaacgaagtggcaacggcaaacggtttaaccgggatgtccgcatggctggcaagtacgctgtttgcgctggttgtcggtgcactggctgacaccatcggcttcagcccgctgttcgcagttctggcagtgttcgacctgttaggtgcgctggttatctggaccgtgttgcagaacaaaccggcgattgaggtggcgcaggaaacacataacgatcccgcaccgcaacattaacgtttcgtgtaagttttagtttcccttcaaagccgccttctcaggcggctttttcatcactgcgagtagagctaaactcgcaaaagtggtataacaaatatagtctgccgtatcatgcctggagcgcatatggaaatcactgaaccacgccgtttgtatcaacaacttgccgctgacctgaaagagcgcatcgaacagggcgtctatctggtgggtgataaactgcctgcagaacgctttattgccgatgaaaagaacgtcagccgtacggtagttcgtgaagccatcatcatgctggaagttgaaggctatgtcgaagtgcgtaaaggtagtggtattcatgtggtttccaaccagccgcgccatcagcaggcggctgacaataatatggaattcgccaattacggtccgtttgagttgcttcaggctcgccagctcatcgaaagtaatattgccgaattcgcggcaactcaggtaacgaaacaggacatcatgaaactgatggccattcaggaacaggcgcgcggcgaacaatgcttccgtgattccgagtgggatttgcagttccacattcaggtcgctctggcgacgcagaactccgccctggcggctatcgtggaaaaaatgtggacccagcgtagtcataacccgtactggaaaaaactgcacgaacacattgattcccgtaccgtcgataactggtgtgatgaccacgatcaaatcctcaaggcgctgattcgcaaagatcctcatgctgctaagctggcaatgtggcagcatctggaaaacaccaagatcatgttatttaacgaaaccagcgacgacttcgagttcaatgccgaccgctatctattcgccgaaaacccggtggtgcatctcgatacagccaccagcggcagtaaatgaaattcctgtccgacaggcgctgcaatgcgcctgtttgtctcgtcggtaagcgaaaagtataaagtgtcagcctgtgtaaatcctctcgccaccctcccctgcattcagcaaaatcagactccacggacatgtaattttgataacgaacaacgttgacctttgttacaattagattcaatttgaatttatgtttttgaatgctttcttatctcacgatttaacagggaatagttcaggctgtgttgatgtatcaaacccgcagaacataccaaaacagcaataacattgcggtagtgcatcttttaaaaccagcgtggcgttaaccgattcaccaggaataatgaatggaacttttgacccaattgctgcaagccctgtgggcgcaggattttgaaaccctggccaatccaagcatgattggcatgttgtattttgtcttgtttgtaattttgttccttgaaaacggcttgcttccggcggcctttttaccgggcgacagtttactggtattggtcggcgtgttgattgcgaaaggcgcgatgggctatccgcaaacgattctgctgctgaccgttgccgccagcctcggctgctgggtcagctatattcaggggcgatggctgggcaatacccgcaccgtacaaaactggctatctcatttacccgcgcattatcatcaacgcgcacaccatctttttcataaacacggtttaagcgcgctgttaattggtcgctttattgcgtttgtcagaacactgctgccgacgattgccgggttaagtgggctgaataacgcgcgctttcagtttttcaactggatgagcggtctgctgtgggtattgatcctgacaactctgggttacatgctcggcaaaacgccggtatttttaaagtacgaggaccagctgatgagttgcctgatgctgctcccggtggtgctgctggtgtttggcctggcaggttctctggtcgtgttatggaaaaagaaatatggaaatcgggggtaagggatgcaaatacctcgcatgagccttcgccagctagcctggtccggcgctgttttacttctggtcggcacgctgttgctggcctggtccgcggttcgccagcaagagtctacgctggcgattcgtgccgttcatcaaggcacaacgatgccagacggttttagtatctggcatcaccttgacgctcatggcattcctttcaaaagtatcacccccaaaaacgacactctgttaattacatttgactccagcgaccagagcgccgccgcaaaagcggtcctcgacagaacattgccccatggctacatcattgcgcagcaggacaataacagtcaggctatgcagtggctgacccggttacgggataactctcatcgcttcggataacttcctgttatccgaaacatatcactcactttggtgatttcaccgtaactgtctatgattaatgaggcggtggttaacactaccgcttcgttgtctggacaatcgttcctttgtaataggtccgaatcacaatggaaggttcaagaatgaaataccgcatcgctttagctgtttctctctttgctcttagtgccggtagttatgccactaccctgtgtcaggaaaaggagcaaaatatccttaaggagatcagctatgccgaaaaacaccaaaaccagaatcgtattgacggtctgaataaagccctgagtgaagtccgggccaactgtagtgatagccagctgcgtgccgatcatcagaagaaaatcgcaaagcagaaagatgaggtggcggaacgccagcaagatttagccgaggcgaagcaaaaaggcgatgccgataagattgccaaacgcgaacggaaactggcagaagcgcaggaagagctgaaaaagctggaagcgcgcgactactaactcacaatagtcactacttactcacctggagaaaactatgagcaaagaacacactacggaacatctgcgtgctgagttgaaatccctttccgatacgctggaagaggtgcttagcagttctggcgagaagagcaaagaagagttgagtaagattcgtagcaaagcggagcaggcactgaaacagagccgttatcgcctgggtgaaaccggtgatgccattgccaaacaaacccgtgtcgcggcggcgcgtgccgatgagtatgtgcgcgaaaatccgtggacgggcgtgggcattggcgctgcaatcggtgtagtgctcggcgttctgctgagccgtcgttaattatggcggacactcatcacgcacaagggcccggtaaaagcgttctgggcatcgggcagcgaattgtttctatcatggttgaaatggtagagacacgtctgcggctggcggtggtggagctggaagaggaaaaagcgaatctctttcaacttttactgatgctgggcctgacgatgcttttcgctgcatttggtcttatgagcctgatggtgctaattatttgggcggttgacccgcaatatcgcctgaatgcgatgattgccaccaccgtggtgttgctgctactggcactgattggcggtatctggacgctacgtaaaagccgtaagtctacgttgctgcgccatacacgccatgagttagcaaacgatcggcagctgctcgaggaggagtcccgtgagcagtaaagtcgaacgtgaacgacgtaaggcgcaactgcttagccagatccagcaacaacggctggatctttccgccagtcgtcgtgaatggctggagacaacaggcgcttacgatcgtcgctggaatatgctgctaagtctgcgctcctgggcgctggttggcagtagcgtgatggcgatctggacgattcgccatcctaatatgctggtccgctgggccagacgcggttttggcgtatggagcgcctggcgtctggttaaaacgaccctcaagcagcaacagcttcgcggttaacttccctctggccggagccattccggccttatccctcaaattttttgaagatttttgacagttttccttgctaacaatcatcattcaccacgtttatgattctctccatcgacagcaacgacgctaataccgcgccattgcacaaaaaaacaatcagcagcctgagtggcgcagtggagagtatgatgaaaaaattagaagatgttggtgtactggtagcgcgcattttaatgccgattctgtttattaccgctggctggggaaaaattactggctacgcgggtacccaacaatatatggaagcaatgggcgtcccgggttttatgctgccactggtgattctgcttgagtttggtggtggtctggcaatcctgttcggtttcctgactcgcaccacagccctgtttactgcgggctttacgctgctgacggcatttttatttcacagcaactttgctgaaggcgtcaacagcctgatgttcatgaaaaacctgacaatttctggcggattcctgctgctggcaattaccggtccgggcgcgtatagcatcgaccgcctgctgaataaaaagtggtaagcacgcgctatacttaacgataaaaaacgaggaggaagctcctcgtttttgctattggaggagagaaaaatgggtcaactgattgacggcgtctggcatgacacctggtacgataccaaatctaccggcggtaaatttcaacgtagtgcttccgcatttcgtaactggctcactgccgatggcgctcctggccccactggcacaggcggttttatcgcagagaaagatcgttatcatctctatgttagtctcgcctgcccgtgggcgcaccgcacgctgatcatgcgcaaactcaaaggactggaaccgtttatttccgtttccgtagtgaacccgctgatgctggaaaacggttggacctttgatgacagttttccgggagcaaccggagacacgctctatcaaaatgaatttctgtatcagctttatctccacgccgatccacactacagcggacgagttactgttcccgtgctgtgggacaaaaagaaccacaccatcgtcagcaacgaaagtgcagaaatcatccgcatgttcaataccgcgtttgatgcgctgggcgcgaaagcgggtgattactaccctccagccctgcaaacaaaaattgacgaacttaacggctggatttatgacaccgttaacaacggcgtgtataaagctggttttgccaccagccaggaagcttacgacgaggcggtggcgaaagtgtttgaaagcctggcacgactggagcagattttaggccagcatcgttacctgaccggcaaccagctaaccgaagccgatattcgcctgtggactacgctggtgcgttttgatccggtgtatgtgacccacttcaagtgtgataagcaccgcatcagcgattacctgaatctgtacggttttctgcgcgatatctaccagatgccggggatcgccgaaacagtcaatttcgatcatatccgtaatcattacttccgcagccataagaccatcaaccctacggggattattagtattggtccgtggcaggatctcgatgaaccgcatggacgagatgttcgcttcggttaaaaaaaggcaccttacgaggtgcctctgataattagctaagtgcatgttgttcatgtcggatgtggcatgaacgccttatctgacatacaaaacattgtacattcaatagattgcataacccgcgcagaccagataagcgtagcgcatctggcgattttgcgcttgtcatcagtcttagcgcgccttcacggcactttattaattccttgaacgaatatttactgccatttcattcacgtctattcttaatttgctgctttaaaaacaagtgattgagcaaaattgaggcaaaaatggactggtatctgaaagtactaaaaaattatgtcggtttccggggtcgtgcgcggcgcaaagagtactggatgtttattctggtcaacatcatctttacgttcgtgctggggctgctggataaaatgttaggctggcaacgcgctggtggcgaaggcatcctgacgacaatctacggtattctggtgtttttaccgtggtgggcggttcagttccgccgcctgcacgacaccgaccgcagcgcgtggtgggcactgctattcttaatcccgtttatcggctggcttattatcatcgtctttaactgccaggcgggtacgccaggcgaaaaccgctttggaccagatccaaaactggaaccttaaaacaaatctgctcgccggatgtctgactcatccggcttttatcattatgttgatgaatgaataatttactaatgtttatttaaaatatttcaatgtcgttatataaattacctataaaaaataaccatgtatttatcttaaatatcaaaacctttataacatccgaaaaagaaagatacgaatagcatttacacaatacccggaatagactttcgtcacttttaattaaagggatgtttttatgcagtggtatttgtccgtattaaaaaattatgttggtttctctggtcgcgcacgtcgtaaagagtactggatgtttactctgattaacgccatcgtcggcgctattatcaatgtcattcaattgattttaggtctggagcttccatatctgtctatgctttatttgctggcaaccttccttcccgtccttgcgcttgctatccgtcgcttacacgataccgaccgtagtggtgcctgggccttgctcttttttgttccgtttattggctggctcgtgcttctggtttttttctgcacagaaggtacttctggcagcaatcgttacggaaacgatccgaagtttggtagtaattaatcttagaattggggcgatatttcgcccctttttattaacaataataaatattattttccgttaaaaagtttgggaatttcccgcagacaccaggatttcgcttcccccatactgtcacgacgccaggccataataatatcgatctcgctggtgctttccgggctgacgacacgcaaccgcccttccgcaatatctttttcgaccataggatacggcatcgtcgccacgccaagccccgccagtaatgcctgacgtttatcttcaatcgtgctcaccgttaagcgcggctgtttgtccagcagctgtacggtcaacaccgggcgctcacgagcggtatccgccaccgcaattccacgatatttcacacgcgtcacttcagataacggttccggctcctgatgaatcgggtgatcaggcgcggcaacgtagacgttcattaacgtatagagcttgcggctgttgatctcgctgctggaacgaaaatgcatatccggcgcgataacaatatccgcccgcccctgctccagccgttcccacgcccccgccagcacttctgtgatgattgccagttgggtattggcttttgccgccagtttgtcgattaacgggaaaaaggcaggtgtcggtaccagcgcttcggtcacaatggtgagatgcgtttcccaaccgcgcgcgagagcttccgcatcagtagtcagtttatctgcggcttccagcaaaacgcgccctcgctccaacaacatcctcccgacattggtgaatttggtacgatggccgctgcggtcaaacagcaccacatccagctcttcttccagtttttgcatggtgtagctaagtgcggaaggcacgcgtcccagctcatccgccgccgccgcaaaactgccccggcgatcgatcgcatccataacccgtagtgcttccagcgttaatgccctttctttggccatttcgttctcattcaggaaatttgaacataccgggcagaatatctggctaacaatgtagcgtccagccccttaccataaaaggaagtaaagagaggtcaagaattatgattactacccgaactgccaggcagtgtggacaagcagactacggatggttgcaggcccggtatactttttcctttggacactacttcgacccgaaattgttaggctatgcctccctgcgtgtgcttaaccaggaagtgctggccccaggtgccgcctttcagccgcgaacctatcccaaagtcgatattttaaatgtgattctggatggagaagcagagtatcgcgatagcgaaggcaatcatgttcaggccagcgccggagaggcgttgctgctctctacccagccgggtgtcagctatagcgaacacaatctcagcaaagacaaaccgttaacgcgaatgcagctttggctggacgcctgcccgcagcgagagaatccgctgattcaaaagctggcgcttaatatgggcaagcagcaattaatcgccagcccagagggtgcgatgggaagcctgcaattacgccagcaagtgtggctgcaccatatcgtgctcgacaaaggcgaaagtgcgaatttccagttgcatgggccacgcgcgtatttgcaaagcattcacgggaaatttcatgcgcttacgcatcatgaagagaaagcggcgctgacctgcggtgatggggcgtttattcgtgacgaggctaacattacgctggttgccgattccccactgcgcgctttgctgatagatttgcctgtctaattgtttttacagggagatgatgatgagtaaaaaattggccaaaaagcgccagccggtgaagcccgtggtggcgaaagaacctgctcgcaccgccaaaaattttggctatgaagagatgttgagcgagctggaagctatcgtcgcggatgctgaaacgcgtttagccgaggatgaagctaccgcgtaaagacaggttgccggatgcggcgaaaacgccttatccggcctacaaaatccaacaacattaacgaattaaacaacccgtaggccggacaagatgcgccagcatcgcatccggcacgatccccaaaacctggcgtttatctggccttgctcgccataatctcgataatctgccgatccgtttgctgcatgctatggcttgctaacgcacacaggttggcaatgctctgctcaacatcatgcgccacaatcccttcattgccggtcacggcggtatcatccagcgccattaacaccgctttccacgcagcgctagcactggtgctaaccttcatcgcgcagctgttgctcgcaccatcgcaaatcatgccgctgacatcgccgatcatactgctgatcgccatgctgatggtttcataacgcccatccaccagccatgccatcccggcggcggcccccattgctgcggtcgttgcggcacacagcgcagacaaacgcggtaactggttatggatgtaaattgcgctcaaatggctaagcatcagcgcacgcgccagccgttcatcatccgctccgaagtgttctgctaccaccaccacaggcattgttgcggtaatcccctggttaccgctgccggagttactcatagccggaagcgtagcgccgcccatacgcgcatcggatgccgcgctggtacgaatcacaatggaactagagagatctttcgccagcaaaccgcgctcgcactgtttttccagcgtcgcgccaatatgcagcccccacttaccgctcaaaccttcctggcttaacgcacaatttagcttcgcggaatcgagaataaagcggatcgccgcaaacgggacttcattgacgaacttcaggatctcagccagcgtcgttctggaaagcaccgtcagcggagactcttgctcgccctctgccacacacgcctgctgggtaaacaccacaccatcgtgcgtctcgatatgcacaatgttggtatgcccgccgacgatggtgacacacgcccacttctcaccgttccagactttggcgcgactgaagaggatttcatcgcaaggttcctggatcttaacggagactttccccgccgccagcagtgctttggcatcggcaattgcctgcgctgttgcgtctttcagcacttccagcccggcgttggcatttccacctaacgcccccagcgccgccgcaatcggcagccccaccattcccgtgccgggaacggtgacgcccagaccgttcttcatcagatttgggctaacccaggcttctacacgttcaaccggaccttccagttctgccgcagcaaccgccgccgccagcgccagactaatcggttcagtacatcccagcgccggttttacttcctcctgaacggcgaggatgtaacgctgccataacggatttaaagtgctatcaaacatattaaaaaccttaaaatttcaggtaaatcaagaaaatgccaggaacggagaaacacacagcaacaaaccagtgacgataatcaggtacagagacatccctttgtatttgtgcaatgctggtactttgtaaaccagccacgccgggatcaggcaccctaccatgccgaaaatcgggctacagatagaggtgaagctcaacaccggtgcgttcagtacgatggcgctccaggccagcaaaatggcgaaaatcatgatgccgcgctgaacgagattttcgttaatcttctcggcaggcatcttgcgacgcaggatgttcattacgatcccttgcgttgcttcgcgaaagcctaaatagacgccaaagaatgcagtcatgacagcaaagatattgagaatgacgctgaccactttcacccacgctgcgccgtcaccgctaataaactgtgcggcaatcgccagcgcggaaatattctgctcataggcttttaccgcttcgtcatgtcccatcgccagcgtgaagctcacggcgtagaaaaagacggtgacaaacaaaatgccaaacgcgatattcattgcccgcaatgctttatgccgcgccacttcaatacttttttcccggctgcgataagagatcaccatcggacttaacgtctggataaacagaatgctcgtcagggtaaacggcagcgtaataatggcgtttttcaccagcagccccagcggcggtaggctaccgacgttatacagatgccacattcccaccatgctcacgcccagcgccgcgaccaccagcagcttggtcagcaccatgccggtgctaattttgaataacaatttctcgccgcgactggagatcgccaccagaatgcaaatcagtaccagaccataaaagggactgtcactcagcaacccttccgtcacgccgaaggtatgcaggtaggaagcactatcgttggtgatggcggtggaatagacgaacatccaaatcaccagcattacgaaatagagcgcacctaacaggatgccccagtttttacctaaataaccgctaatgacgctcgggtaatctttacattctggactttctgccagcgtattaataaacaatcgctgaaacagatacattgccgggtaaccaatcacgctactgagcaaaaatacccacaatcccatcaaaccgacctgcaccgggagaaaaacaatccccgcgccaatcgccatcccgatactcataatcacccagccggtgtcagtactgtcgaatttgatcgcttctcgccactcgctctcactcattccagcacgacccgccggggtcgaagcgtctgcaatgacgcctttattcgatgcaatttccataatttctcgctcaatattttgtagggcttattatttttttccgagccgcatcaaggcgatatgcggtctacgtttttgcaggcgagttattagaataaagaaatgatacgcgcgaggtcagagaaaatcttcacaatcaagactttgaaataacggagatggataagaattttctactaaattaatcgcaggagaatattcattctctatttgcggcagatcacaaaaaaaaggtgcacatttgtgcacccaaggatgaaagctgacagcaatgtcagccgcagaccactttaatggccagtcctccgcgacttgtttcgcggtatttatcgttcatatctttgccggtttcatacatcgtctcgatcactttatcgagactaacacgcggtgcgctggtgcggcgcatcgccatccgcgcggcgtttactgctttcacggcattaatggcattacgttcaatgcacgggatttgtacctgtccggcaaccggatcgcaggtcagcccaaggttatgctccatcgcgatttccgccgcattgcatacctgcgccggactgccgcccagtagttcagttaaccctgccgccgccatactacaggccacgccaatctccccctgacagccgacttccgcgccagagatggaggcgttcattttatacagcgcgccaatagcccccgcggccagaaaatagcgggcaatactccgctcgtttaccggacgacggaacttatcgtaataagccagtactgccggaataatgccgcacgcaccgttagtcggtgccgttaccacgcgcccgccagctgcgttttcttcactaaccgccagcgcgtacatgttgatccagtcgatgacattcatcggatcgttagagatgttatcgctggaaaccagctgacgacgcagcgctacggcacggcgcggcacattgagcggaccaggcagcacgccttcagtgttcatcccacgttcaataccgtcatgcatcacttgccagatacgggcaaaaccggcgtcaatttccgctttgctgcgcagcgctagctcgttgtgcatcatcagaccagatatagacaggccgttgtaatcacacattttcagcagttcacctgcactgtggaaatcgtaaggtacggacgtttcgacatcgtggctcaggccgaagtgttcttcttcgacaataaacccgccgccgacagagtaataggttttacttaatagctcttcctgtcccttccaggcagtgatccgcattccgttctcatggcgaggcaacatttcgggatggaagataatgttctttgctacaggaaaatcaacaatatgcgcaccagatgccactggcagccgcccgctgcgcgttactaactctataaatgcagggatctcatcaatgacaacatcctgcggactgtttcctgccagtcccatgatgatggcgacatccgtggcatggcctttgcccgtcagactcaagctcccgtacagatcgaccacaatatggctcgtcgcggttaataagccgctactttccagccgatcaataaaactttttccggcattcattggccccacggtatggctactggagggaccaatcccaattttgaaaatatcgaatgcactaatcatatccacaccctcggattgccgttcagtgaagtggagcggaacgaccttacgaccgtcccgctcacgaggctttacgcactacgtactgcgatggcttcaatttccagcttcacatctttcggcaaacgcgcgacctgcacacagctccgggtcggataggtcgcctgatgctcatcgaagaactgcttatagacttcgttgatggtggcaaaatcattcagatcggtgataaacacggtcatcttgatgatatcgcccacgctcagcccggcagcaaccacgatcgctttgacgttttcgaggcttaaacgcgcctgatcttgcacatcagccgggatctcaccggtctgtgggcaaaccggtatttgcccggaggtgaagaccatgctgcctaaatcaacgccctgaacataagggccgattgcgcctggggcacgttgcgtttcgataatctttttcatacatcctccggcgtcagagcgcctgggtaaaggtacgactaataacatcctgttgctgttcacgggtcagtgcgttgaagcgcacggcgtagccagagacacggattgtcaggttaggatatttttccgggtgctcgatggcatccagcagcatttcccgattcattacgttgacgttgaggtgttgaccgccttcgacatccgcttcgtggtggaaatacccatccagcaggccgacaaggttggttttacgtactggatcttctttgcccagcgccgcaggaacgatactgaaggtgtagctgatcccatctttggcgtaggtgaacggcagtttcgccacgctcgtcaaactggccacggcacctttgcggtcacgaccatgcatcgggttagcgcccggcgcgaacggtgttccggcgcgacgaccgtccggcgtattaccggttttctggccgtacaccacgttagaagtgatagtcagaatgctctgggtagggacggcgttgcgataggttggcagcgctttaattttcttcataaagcgttcaaccaggtcgcaggcaatgctgtctacgcgctcgtcgttgttgccgtactgcggatattcaccgtcgatttcaaagtccaccgccaggccgttttcgtcacggattggtttcacgcgggcatatttgatggcagacagggagtccgtcgccacgctcaggcccgcgatgccgcatgccatagtgcgatagacatcacgatcgtgcagcgccatcaggctagcttcgtagctgtacttgtcgtgcatgtagtgaatgatattcagcgcgctgatgtactgcaccgccagccagtccatgaagtgatcgaggctgtccatcactttgtcgtaatccagcacgtcgtccatcagcggtgctgttttcggcccgacctgaatcttcagcttctcgtccaccccgccgttaattgcgtagagcagcgttttcgccaggttagcgcgtgcaccaaagaactgcatttgcttaccaatcaccattgggctgacgcagcaggcaatcgcgtaatcgtcgctgttgaagtcagtacgcatcagatcgtcattttcatactgcaaggaagaggtgacgatgctcacctgcgcggcatattttttgaaggcaatcggtaattcttcgctccaaagaatggtcaggttaggttccggtgccggccccatagtgtgcagggtgtgcaaatagcggaaggagtttttggtcaccagcgtacgaccgtccagccccatcccgccgatcacttccgtcgcccagattgggtcgccggagaacaggctatcaaattccggtgtacgcaggaagcgtaccatacggatcttcatgatgaagtgatcgatcagttcctgtgcctgctgctcattgagtacgccagctttaaagtcgcgctcaatgtagatatcgaggaagcttgccgtgcggcccaggctcatcgcgccgccattttggcttttcactgccgccagataagcgaagtagagccactgcaccgcttcctgcgcattctgcgccgggcgagagatatcaaagccatatttcgccgccatttcctgaatctgcaacagcgcatgacgatgctctgccagctcctcacgcagacggatggtggcttccagatcctcgcctttttccagacgagactggagatcggcaaattgcagttcgcgttcacgtaccagataactgatgccatacagcgctacgcggcgatagtcaccgataatgcgcccacggccatagccatctggtaaaccggtcagcacgccagatttacggcagcgcagcatatccggactgtaaacatcaaatacgccctggttatgggttttacgcagatcggtaaacagatattcaaattcactgtccatttctcggccataggcgtggaaactacttttaatcatattaatgccaccgaacgggtgtagcgcacgtttcaacggcgcatccgtttgcaggccaacaattttttccagcggctggttaatatatcccgcatcatgagcggtaattgtggtggcaatattggtatcgaaatcaaccggcgcgtgggttgcattttcgatacggatgccttccattactttttcccacaattccgtggtggcaggcgtcgcttcggcgaggaaagattcatcgccttcatacggtgtatagttatgttgaataaaatcgcggacattaatttcgtttttccagtccgtacctttaaagccaagccatgcgtcggcgtacagcttatcgctggtatcaatatctaccttcatgaaaaataatctctctacaatacttcaactaaattatgcaaattctgcgggcgcgttaactttgcctaaatgaatggcatccaaagcaatcattttttcttcgttagtcggaataacggcacaaatgacacgcgcattttcactggaaacaattcgctcaccacaggagttagagcgattattcatttctgtatcaatctctaagcctaatacagccaaatgttccatgaccagacgacgaattaagctactattctctcctattccgccggtgaatataattccatccaggcgacgtaaactagctgcgtgtccggcaatatgacgggcaattcggtgaacaaaggttttaattgccagttgcgcgcgttcgtgaccttcatgccaggctttttccagaacacgtaaatcgctagaaagaccggaaatacctaataatccgctctctttattcactacgcgttccaggtcacccaggctctggttggtttggctggcgacccaggacatcgcaccaaagtcgacatcgccactgcgggtacccatcatcaagccttccagcggcgtcattcccatactggtatcaacactctgaccgttgcgaaccgcgcagatactcgcgccattgccaagatgcgccacaaccaggccggagtcatcttccgccagattcagcaggctatgtgcgcgctgggaaacatagcggtggctcgtgccgtggaaaccataacggcgtacacctaactcttcataatatttccacggcaggccgtataaataagcttccggagccatcgtctggtggaaactggtatcaaataccgccacctgagttacgcccggaaataattgctgcgcgctttcaataccacttaaattggcgtaattatgcaggggtgccagtggagaaacgcgacggatattatcaatgacttcatcggtaataatggcggactcggtaaaaatactgccgccgtgagcgatgcggtggccaattaaggccacactgtcatttaaattccgtttttccagttcaaatgcaattgccttcaatgcaccttcgtagctgtggtgagccagcggtgctggctctcccccatttacggataagaatgcattttcgctgttaataccgtcggcaataccactcattaatacttcacagtcgctggcatcgagcacggaaaacttaatgctagagctaccacagttaataaccaaaacaaccggaaattcattcatctcttttctcatcctgagttacggattaaaacagtttgtatacgatgttcaggatggtcagcagaccaatcacggtaacaaacacgttatccagacgaccacggtatttcgccagagacggcgctttacggatggcatacatcggcaacaggcacagcagggatgcgataatcggtgcgcccatggcttcaatcaggtcaaggatgttcgggttggcgtaggcaacaacccaggtggagcccatgatgaagatcatgctgatagtgttcagtttacccaggctcactttagttttgtcgcctttataaccaaacttcaggaccaggccattcagaccttccagcgttcccagatagtgaccgaagaaagatttgaagatagccacgagtgcgatgatggaagccgcatattccagtgtaatcgcgaacgttgttttggtaccggtcatggacgcaaagtggttagccagataagaaagcactggaatattctgcgctttggcttccgccatgttggccggagacagagtaaacaggcagctaaaggcaaagaacatcaccactgcaaccatcagcatgctggcacgagaaatgatttgggaacatttacgttcggtgaagtcgcgaccgaagtctttctcatactcttcacgcttagaaaccacgaaggaagagacgattgggctgaagttaaaggagaaaaccatgatggaaatccccagccagacagtgatcaggataccgtcatgaccggttaagctcaggctaccgaggtcaacctggtcgataactgcagagttccagtaagggatcaggctcaaagaaatcagcaccaggctggcgataaacggccataccaggtagctcatcactttaaccatcagatccttaccaaaccagatgacgaaagccatcagcagcaacaggaacagcgccacaaagccgcgattcagcggtgcaaagccgagctggttttcccagaacgtcataaaggtattggtaatagtaacgccataaatccacagcagtgggcaaatcgcgaagaagtacaggaacgtgataaccacgccgccagttttaccaaaatgctcttccaccgtttccgtaatgttgccggaagggttagagccagaaagacacagacgcgccagcgcccggtggcaataaaacgcgatggggtatgccaataccaacatcagaagaatcgggatcagtccgccaaaacctgcgcggatagggaagaacagcaccccggcgccgattgccgtaccaaacaagcctaacgtccatgtggtatcacttttacgccaggagctttgttttgtctggctggatacaatgctatcactagtactcatatcctatcctcaacgaattaattaagcgtcaacgaaaccggtgatttgagagacgcgagaaagatcgatattgccgccggaaataatactgacggtttttctgttttgaatatattggtctaatttaccgcttaataatgcagcacatgccagagcgcctgcgccttcggtgacgactttattgcgctgaattaaggcaatcatactgtttctgatttcgtcttcgctgaccagcacgatgtcatcgactaattcacgaacgatttcgtaagttaaattacccgggcgggagacatcacaaccatccgccagggtgccggtagttcggtgcgtggttatttctccggagtggaaagaagccgccatgccgtgaacgttttcagactgtacgccaataacacgaatggtcgggttaatagatttaattgccaccgcaataccagcaattaaaccgccaccaccaattggcacaatcacgttatcgacatcatagagatcttccataatttccagaccaatcgttccctggccagcaatcactttcggatcatcgtaaggtgggataaaaatacggccttccatttcgacaatttcgctcactttagcgatagtgtcgttgaagttatcaccatgcagaacgacttctgcggagtagtcgcacgttgccgctactttggattttggcgcaccttttggcatcaccactttaccgtcgatacccagcatcgcgcaggagagggaaaccccttgcgcatggttgcccgcagaacaggccaccacgcctttgcgtttttccgcatcggtcagactacttaatttattaaatgcgccacgaattttaaaactacccgtacgctgcatattttcaaacttcaggaatatttcacctttgcaacgttcactaaaatagttggagcgaggcatgcctgttttataaattcgcccagccagtcgttgtttcgcttcaataatgtcatcaatagcaaccggcagatcgtatgtaatatgcattataaaacctcttcgcctgaattaaatatgtaggtaaccgtaaccgacacctgcaagacagacaggtggattatttatgtttaaataaaaacaaataattaaccaacttctattaattgccttcgtctacacccattataagaactatactctttggctaattccaccaaaacgcttgctgcttttttaatacgataatttttgctccataccgcggcatattgtgccacaggtaatgtttcttcaaccggaatagtaataaattgattagaaccaaaaggactcgtcatatcacaaggaattacagttaagaaatcagcattgagaacaagattataaattgtcacgacactgtcggttttaacgatgttttcaatactgatgccatttctttgtaacgtagtaagcagttcgctgtagtaccccatattagtttgtggcaacacccactgttcgttcttcaagctctccagcgtggtggtgccggtgcatgttcgggacttactggctaccagcacaaactcggactcgaacagcggctcaacatgtaaatcctgaagcttcatttctgcacttaacgtaccaatcgcaaaatccagtcgaccgtcgcggattgccggtaagaagctagacagttgcgcttcatacatagaaacctgcgctttcgggaacacctctttgaacttgttgatcatcccactcataaaagtaaaaccaatcaaactaggaaaaccaaaactgacttccaccaccgcctcagaagacataccgcttatctcattaaccatatttttcatttcacgggtaatggattcggaacgggagagtaacaattgaccggcaggtgttaatgttacaccggtatttttccgcaccactaattccacaccaaaataatcttcaatatcgttaatgattttactgacggccggttgagttaaccctaattcttttgcagcgctgccgatagaaccacttctaatgacttcctgaaagactaccaggtgctgcgttttcggaagaagaatagtgctcataacgacctacgttaattacctcattgacggcatgaagtgtatcaaaatgaaatgaacaggatatgtgcgaccactcacaaattaactttcaatactttccagagtatcgttattacaattaaatacctttaaatatcaacaagttaaagtataaaaatcagcataaaccctgatttttgtcaaaaaaaatgacggggataaccatattttatggcgataacatcattcgttatgtggttaatacaaaaaaggggctgagaccatatttcaagcaattaccggataattaccaggcaaaatttgagttaaatttaatgagcaagttcagtaattttattataaataaaccatttagtgtgataaataatgcggcatgtcacatttttagtcgctatttgttggagaacaaacatttattttatcaatattttaaaattagcaatacatgtattgatcatctcgaacaattgattaacgtcaactttttctcttctgacaggacgagtttttgtgaatgcaatcgttttccataaattcttctcccctcataggcgacgaatagcattttgtgttgaggattacaaaacgaataattgctgatcgccgcgataaggtcagacaaagacaacaagggaaattttcacagagcttttgatcggcgtaggccacagaatgttgcttcgtttactgtaacgccgggtaaatgagcgttttttgatagtgcgaaagaaccctgcgaggaaaataagcatctattattgtttgtcatgatgacaaggcaggcatcaatgaaaggcttcccaattgcgcatatttttcaccctagtatcccgccaatgcacgcagtggttaacaatcacaatagaaatattgattattggacggtaaaaagaaagtttgcagaaattgtctccaccaatgacgttaataaaatttacagtataagtaatgaactgcggagagtattatctgcaataactgcattgaatttctatcatggcgatgttccttctgtcatgatccgaatccaaccggaaaatatgagtccattcattatagatatttctacaggagaacatgatgattatatcatacaaacattagatgtaggcacttttgcaccttttggtgaacaatgtacttgcagtgccgtcaataaaaaagagctggaatgtattaaggagacgatttctaagtattgtgcaaaattcacccgaaaagaagccatcttaaccccccttgtgcactttaataaaaccagcattactagtgattgttggcaaattctcttttttagtcccgatcattttaataatgatttttattgattatttataaaggataaaataatgttccctgttagtagtattggtaatgatattagtagtgatttagtccgtcgaaaaatgaatgaccttcctgaaagcccaacaggaaataacctcgaagcactagcaccaggtatagaaaaactaaaacagacctctattgaaatggtcactttacttaacacgttacaacctggtggaaaatgcattatcactggtgattttcaaaaagaattagcgtacttacaaaatgtaattctttataatgtcagctctcttcgtctggattttttaggttataacgcccaaattattcaacgaagcgacaatacttgtgaacttaccattaatgaaccgttaaaaaaccaggaaatatccacaggtaatatcaatattaattgcccattaaaagatatttacaatgaaatcaggaggttaaacgtaatttttagttgtgggactggagatatcgttgatctatcctctctggacttacgtaatgtcgatttagattattatgatttcacagataaacatatggctaatactattttaaatccttttaaattgaatagtacaaattttactaatgccaacatgtttcaggttaattttgttagtagtacacaaaacgccacaatctcctgggattatttactaaaaataacgcctgttttaataagcattagcgatatgtattctgaagaaaaaatcaagtttgtcgaaagttgtttaaatgagcctggagacattaccgaagaacaattaaaaattatgagatttgcaattataaaatctataccaagggcaactcttacagataaattagaaaatgaattaacaaaagaaatatataaaagcagtagcaaaatcatcaattgcttgaacagaattaaattaacagagatgaaagaattcagtagtgaaaaaatatatgattacatcgatataatcattgaagattatgaaaataccaaagaaaatgcttatctggtcgtcccccaaattaattatactatggatttaaacatagaagactctagcagtgaagagttacttagtgataataccctcgagaaagacgaaaattctccggacaatggctttgaggtcggggaatataacacatatgaagcatataacagtgagaagcaatattttaccagagaggactatacgtatgattacgaccttttaaatgcaatataaacttaataacttcttacaaagtctattattaataccgtagatatttattcatcttaccctgtgcaccaaaagcaaaaactcactgacgcgggtttgaaactgatggcaaccgcaaaaatgcctgatgcgctacgcttatcaggcctacgccatctctgcaatatattgaatttgcgtgcttttgtaggcaggataaggcgttcacgccgcatccggcatgaataaagcgcactcaacaatctgaaacccgccggaacggtttattacgtacatcaggtaaaactgaccgataagccgctttcttttgggtatagtgtcgtggacagtcattcatctttctgcccctccaaaagtaaaaacccgccgaagcgggtttttacgtaaaacaggtgaaactgaccgataagccgctttcttttgggtatagtgtcgtggacagtcattcatctttctgcccctccaaaagcaaaaacccgccgaagcgggtttttacgtaaaccaggtgaaactgaccgataagccgctttcttttgggtatagcgtcgtggacagtcattcatctttctgcccctccaaaagcaaaaacccgccgaagcgggtttttacgtaaatcaggtgaaactgaccgataagccgggttctgtcgtggacagtcattcatctaggccagcaatcgctcactggctcaagcagcctacccgggttcagtacgggccgtaccttatgaacccctatttggccttgctccgggtggagtttaccgtgccacggactgttaccagccgcgcggtgcgctcttaccgcaccctttcacccttacctgatcccgcttgcgcgggccatcggcggtttgctctctgttgcactggtcgtgggtttcccccccaggcgttacctggcaccctgccctatggagcccggactttcctcccctccgcccgtctcccccgaagaggacgacgacgaagcggcgactgtctggtcagcttcggcgcgcagtatagagggtttgcgcgcccttgtcaccccgcgttgcgcattccaatcgccagtgtcgcggcgatattacgactagcacggcagatattgtcataagccccgcggaatgcttcgtccaacgtacctatgctggtcaatacgctgaagaccgcatcaatgccatgctgatgtacaacgccaacatcatcggtcaggctacccgcaatgccaatcaccggtttatggtacttcttcgccacgtttgcgacaccaatcggtaccttcccgtgaatactctggctgtcaatacgcccttcaccggtgatcaccagcgtacaatcgtgaatatgttcctccagattcagcgccgtagtgacgatttcaataccacttttcagttccgcaccaagaaacgccattagcgccgcgcccataccacccgcagctcctgcaccggggacatctttcacatcaacatgcagcgcttttttaatgacctcggcatagtgagagaggttattgtccagctcaacaatcatcgcttcactggctcccttttgtgggccaaagatgcggcttgcgccgttatcgcccaccagcggattggtgacatcacaagcgacgcgaatgacgcaatcttttaagcgcggatcgaggccggaaatatcaatatcattcagagtattaagactaccgccgccaaaaccaatttcattgccgttggcgtcgcataatttcgcccccagcgcctgtaccatgcctgcgccgccatcatttgtagcgctgccgccaatgccgataataatgtttgtcgcaccgctctccagcgcctgcaggattaactcgcctgtgccgcgactagtggtcacgagtggatcgcgtttttccgcaggtaccagctccagcccactggccgccgccatttcaataaacgcggttttgccatcgccggagatcccccaactggcattcactttctcgcccagcggccctgtaacccaggcgtgacgttcagccccctgggtggctgcaatcatcgcttccaccgttccttcgccaccgtcggcaaccggaacagaaacgtactgtgcatcaggaaaaatttcccgaaatcctttttctatcgcctgcgcaacctcgctggcagataaactttctttataagagtctggggcgattacgattttcatacctatgcctgttaccacatgacgccggagggcgtttctcttattcggcctggattccaggcccggattgcaatacgccatccgggcacgacgtcattaacgagtaacttcgactttcgccagtttttcgtagtagcacgccagggcgctatgatccgccgttcctaaaccatctgctcgcagtgcctgcatcatctccataaccgcagctgtgagcggcagttgtgcgccgacgccgtgagaagtatccagcgcattcgccagatccttaatatgcagatcaatacggaagcccggcttgaagttgcggtccatcaccatcggcgctttggcatccagcacggtactgcccgccagtccaccgcgaattgcctgataaaccaggtccgggttaacgcccgctttagttgccagcgttaacgcttcactcatcgcggcaatattcagcgccacaatgacctgatttgccagtttggtgacgttacctgcaccgatttccccggtatgcaccacggaacccgccatcgctttcatcaaatcatagtatttgtcgaaaatagccttgtcgccgcccaccatcacactcagcgtaccgtcgatggctttcggttcaccgccgctcaccggagcatccagcatatcaatgcctttcgctttcagcgcttcgctgatttcacggcttgccagcggtgcgatagaactcatatcgatcaataccgtacctggcttcgcgccttcaataatgccattctcacccagcgccacctctttcacatgaggggagtttggcagcatggttatgatgacgtcgcactgttcagcgatcgctttagccgtagacgctgtttctgcacctgcagcaatcacgtcagcaatagcttctgggttacggtcagcaaccaccaggctgtaacctgctttcagaaggtttttactcattggtttacccataatccccaggccaataaaaccaactttcatagtcatatcaatcatctctcttgttgcggtggtggttattttttaaaggtatcagccagtttctgagtggcagagcggaagacgccgagatcgctgccgacagccacaaacgtcgcgccccattccagataacgacgcgcatcggcttcgaccggcgcgaggataccgctgggtttgccgtgcgcgctggcacggttaaaaatgtgctgaattgctttttgtacatccgggtgacttgcattgccgagatggcctaatgccgcggccagatcgctggggccgacgaagatgccgtctacgccttcggtagcggcaatggcatcgacgttatctacgccctgctgactttctatctggaccagaatagtgatgttcttgttgctctgagcgaaataatccgccacggtgccaaacatattggcgcggtgagaaacggagacgccgcgaatgccttccggtgggtaacgggtacttgccaccgccagctctgcttcctcttttgtttctacaaaaggaatcaggaagttatagaaaccgatatccagaagacgcttaataattaccggctcgttggtcggcactcgcactactggcgcgctggcgctgcctttcaaggccattaactgcggaataaacgtggagatatcgtttggcgcatgttcgccatccagcaccagccagtcaaacccagccaaaccaagaacttcagtgctaatcgggttagagagtgcactccagcaaccaatttgtacctgtttcgcagccagtgcggctttgaatttattcgggaaaacatcgttattcatcgcttatacctttgcttatttctgcaattccatacgtttaatgtcgccaactacgaagaggtagcagaccatcgccatcagcgcactacatcccacgaaaaccagtgctgcattgaaggagtgcagttcacttaccaggtagccaatcaccagtggagtgacaatggaggcaacattgccaaagacgttaaagacgccgccgcagaggccaacaatctctttcggcgcggtgtcagaaatcaccggccagcccagcgcaccaaatcctttgccaaagaaagccagcgccatcagcatgaccaccagcgtggtgttgttggtgtagttacataagatgatggtggaagccagcaacattcccagcacaatcggtagcttacgtgccagggtcagggataaaccgcgtttgatcagataatcgctgaagacacctcccagcacgccgcccgcaaaaccacacagtgctggaatgctggcgaccagacccactttcagaatgctcatgcctttttcctgcaccagataaatcgggaaccaggtgaggaagaaccaggtgatggtgttgataaaatattgtccgaaaaatacgcccagcatcatgcggttagagagcaattgcttgatgtaatgcagtttgggtccgcttgctgccgcactgcccggctttttgtggtccatatcgaccaccgcgccattttcagagataaacttcagctcttccgcagacatacgtgggtgatctgtcgggttatgaatcaacttgatccacagcgccgtcagcacaaaaccaatcacccccataacggtaaagacgtgctcccagccccaggcgaaagtcagccagccaagcagcgggctaaagagcgccaggctgaaatattgcgcgctgttaaagatggcggaggcagtaccacgttctttcgtcgggaaccaggcggcgacaattcgggcgttcgccgggaaacttggcgcttcgctgaagccgagcataaagcgcataaagaacatggagatccctgcccaggccagcgggaacatatcaacaaagccttgcaggaaggtgaataggctccagaaaaagaggctgtaggtgtaaacttttttgctgccaaacttatcaagcagccagccgccggggatttgcatcagcaagtaggcccagccaaaagcggagaagatgtaacccatgctaaccgcacttaactgcaactcttttgccacttcggtaccagcaatagacagcgttgcacgatcggcgtagttaacggcggtaacaataaaaataatcagtaatattaaatagcgggtatgcacgcctttctttttttcgtcaacggtgtccagaatcattttatttacctcgggtacttatgctgatttttattattatggggaaggtgttatttatgagtttcatttatgccgtaacgacaatgaactcgggaattagtataagcagcgcgagaataataatcattgtgcaaatgctaatttaattaatactatttaaatattattttgagcatatgcacataaggttgcgcgctaaagcacagatttgcgctttaccttaccgggcggcactgcaatccctgaaatgattgacattgatcacatttctgcgtttaaactcctgacattcttatttcacccaatgaagtcatttatttttaaatgagaccaggtcctcattttaataacccctggctggagaatattgcacaatggccaacatcgaaatcagacaagaaacgccaactgcgttttatataaaagttcacgacacagataatgtggcaattattgttaatgataatggcctgaaagcaggaacgcgttttccggatgggctggaattaattgaacatattccccaggggcataaagtcgcattgctggacattccggctaatggtgaaattattcgttatggcgaagtgattggttacgccgtgcgtgcaatcccacgcggaagctggatcgacgaaagcatggttgtactaccggaagcgccgccgttacacacgctgccactggcaaccaaagtcccggaacccttaccgccgctggaaggatacacctttgagggctatcgcaatgccgatggcagcgtgggcaccaaaaacctgctcggtatcaccaccagcgtccactgtgtggcaggcgtggtggactatgtagtaaaaatcattgaacgcgatctgctaccgaaatacccgaacgtcgatggcgtggtggggctgaatcatttgtacggttgtggcgtggcgattaacgcaccggcggcagttgtacctatccgtaccattcacaatattagcctgaatcctaactttggcggcgaagtaatggtgattggcctgggttgtgaaaagttgcagcctgagcgcctgctgactggaacggatgatgtgcaagctattccagtagaaagcgccagcattgtcagtttgcaggatgaaaagcatgtcggttttcagtccatggtcgaggatattttgcagatcgccgaacgccatctacaaaaactgaatcaacggcagcgagaaacctgcccggctagtgaactggtcgttggtatgcagtgcggtggcagcgatgcgttttctggtgtaacggcaaacccggcggttggctatgcgtctgatctactggtgcgctgcggcgcaacggtgatgtttagtgaagtaacggaagtgcgtgacgcgatccatctgctgacaccacgcgcagtgaacgaagaggtcggcaaacggctgctggaggagatggagtggtacgataactatctcaatatgggaaaaaccgaccgcagcgccaaccctagcccgggcaacaagaaaggcggtctggcaaacgtggtagagaaggcactcggctccattgctaaaagcggtaaaagcgcaattgttgaagtgctgagccccggtcaacgcccgactaaacgcggattaatttacgccgcgacgccagccagcgattttgtctgtggcacgcaacaggtggctagcggtatcacagtgcaagtgtttacgaccggtcgtggtacgccgtacggcctgatggcggtacccgtcattaaaatggcaacccgcaccgagctggcgaaccgctggtttgatttaatggatattaatgcgggcaccatcgctaccggcgaagaaactattgaagaggtgggctggaagttgttccactttattctcgacgtcgccagcgggaagaagaaaaccttcagcgatcaatgggggctgcataaccagctggcggtgtttaacccggcaccggtgacctgatttcttttggaacgtccctcgcaaaacatggccttagtgccatgtttttattgtttaaagcccccacgtccattaataatgcatttgcattaccttagttcaagcttataatttgagcagaaaacaggctgtaaaaggacagtgaatcatgcccgctaatgctcgctctcacgctgtactgaccactgaaagtaaggtcacgatacgcggacaaacaactatccccgcgccagtgcgtgaggccttaaaactgaagccaggccaggacagcattcattacgaaattctgcctggtgggcaagtatttatgtgccgactgggagatgaacaggaggatcatactatgaatgcatttttgcgttttctggatgcagatatccagaacaacccgcaaaaaactcgtccattcaacattcaacaaggaaagaaacttgtcgctggcatggacgtcaacattgatgatgagattggcgacgacgaataatggattttccacaaagggttaatggttgggcgctatatgctcatccctgttttcaggaaacctacgacgctttagttgccgaagtcgagacattaaagggaaaagatcctgaaaattatcagagaaaagccgccacaaagttattggcggtagtccataaagtgattgaggagcatatcacggtcaatccaagtagtccggcattccgtcatggcaagagcttaggctctgggaaaaataaagactggagtcgggtaaaatttggtgctggtcgttatcgtctcttctttcgttatagtgaaaaagagaaagtcatcattctgggatggatgaacgatgaaaacactctgcgcacctacggtaaaaaaacagatgcctataccgtattcagcaaaatgttaaaaagaggacatcctcctgccgactgggaaaccctcacccgagaaacagaagaaacccattgatggtgttcacaatgcccgccgaacgcattcgtgttgaccagcgggcatcctttctcactccccgaccagaatcacttcaaccccagcctttcgcagtccttccaggctatccgcaggaatgccttcatcaacaatgatcatgtcgatacgttgagtatcaatgatcttatgtaaactggaacgattgaacttactggaatcggtgaccacgatgatccgttccgcaacttcgcacatccgacggtttaaacgagcttcatcttcattatgtgtgctgacgccgcgctccagatcgatcgcatctacaccaagaaacagcatatcgaagtggtaattttgcaggctttgctcagcctgatcgccgtaaaaagattggctctgacggcgcaaatgcccgccggtcatcagcagctcaacgccttccgcttccagcaacgcattagccacgttcataccgttggtcatcgcaattacgtcagtgtgcttgcgcatcagacgagcaatctcaaaagtggtggtcccggaatcgaggataacccgatgacctggctgaatcaactcaacggcagctttcgcaacgctgcgtttcatcgcggtgttcagtgcgcttttatcttccacacttggctcgacactcggcgtcgtgctatcgcagatcaacgcgccaccataggcacgcacagcgatcccctgcttttccagaaacgccagatcgttgcggatcgtcacagtagatacgccatacaatgcgctcagatcgttaacctgcacactcccttgctgtcgcagacgctgaatgatctgttctcgtcgctcgctggtgccagtcactcgcttctcaccactagcgtcggtattactcatagtaagtcctttcgtaaaactttcgtttcatttcgttttgcctattaacgcctttctattaagcaaatgcaagcccaccttgcccattgacgcaagctactctcgtttcagtgactttcattatgtttcttttgtgaatcagatcagaaaaccattatctttcgttttatttttatctcaccatgacgcagtatcaactgaaacaaaacgaaagattaatatcgcagtaatctgaactggagaggaaagtgaaacatctgacagaaatggtgagacagcacaaagcgggcaaaacaaatggaatttatgccgtttgttccgcacatccgctggtgctggaagctgcaatccgctacgccagtgcaaaccaaacgccgttactgattgaagcaacctccaatcaggtagaccagttcggcggttataccggaatgacgcccgccgattttcgcggctttgtttgtcagctcgccgacagcttgaatttcccgcaggatgcgttgattctgggtggtgaccatctggggccaaaccgctggcaaaacctgccggccgctcaggcaatggccaatgccgatgatttgattaaaagctacgttgcggcaggattcaaaaaaatccaccttgattgcagcatgtcctgtcaggacgatccgattcccttaactgatgacatcgtggctgaacgcgccgcccgtctggcgaaagtggcggaagaaacctgtcttgaacactttggcgaagccgatctggagtatgtcattggtaccgaagtgccggtacctggcggcgcgcatgaaaccttaagcgagctggcggtcaccacgccggatgccgcccgcgccacgctggaagcccatcgtcacgcctttgaaaagcaaggtttgaatgccatctggccacgcatcattgccctggtggttcaacccggcgtcgaattcgatcacaccaacgttattgattatcagcccgccaaagcgagcgccttaagccagatggtcgaaaactacgaaacgctgattttcgaagcgcactctaccgattatcaaacgccgcaaagcctgcgccagctggtgattgaccactttgccattctgaaagttggcccagcgctgaccttcgccctgcgtgaagctctgttctctctggcggcgattgaagaagaactggtgccagcgaaagcctgttctggtctgcgtcaggtgctggaagacgtgatgctcgaccgcccggaatactggcaaagccactaccacggtgacggcaacgcgcgtcgtctggcgcgtggttatagctacagcgatcgcgtgcgctattactggccggacagccagattgatgacgctttcgctcatctggtacgtaatctggcggatagtccaattccgctgccgctgatcagccagtatctgccgctgcagtacgtgaaagttcgctccggcgagctgcagccaacgccacgggaactcattatcaaccatattcaggacatcctggcgcagtaccacacagcctgtgaaggccaataagcaaaacaaagaggaacacgctatgccaaatattgttttaagccggattgatgaacgcttgattcacggtcaggtcggcgttcaatgggtcggatttgcgggggcaaatctggtgctggtagccaacgatgaggttgccgaagatccggtacaacaaaacctgatggaaatggtactggcagaagggatcgccgtacgtttctggacgctgcaaaaagttatcgacaacattcatcgcgccgccgatcgacagaaaatcctgctggtttgtaaaacacccgccgatttcctgacgctggtgaaaggtggcgttccggtgaatcgcattaacgttggcaatatgcactacgccaatggcaaacaacaaatcgccaaaacggtttctgtggatgcgggcgatatcgcagcatttaacgacctgaaaaccgctggggtggaatgcttcgttcagggcgtcccgacagagcctgctgtggacctctttaaattactttgagggattcatcatggaaatcagcctgttgcaggcatttgcgttgggcattatcgcctttatcgctggcctggatatgtttaacggcctaacccatatgcaccgcccggtggtcctcggcccgttggtcgggctggtacttggcgatctgcataccggaattttaaccggcggtacgctggaactggtgtggatggggctggccccgctggcgggcgcacagccgcctaacgtgattatcggtactatcgtcggcacggcgtttgccattactactggcgtgaaacccgatgtcgcagtaggtgtcgccgtacctttcgctgtcgcagtacagatggggattaccttcctgttcagcgtgatgtccggcgtgatgtctcgctgcgacctggcaacaaacccgcgccgcatttgatgctggtgccgacggcctggtgcattgctataacgggatgacaggtttacatcaccgcgaaccgggaatggttggcgcgggattaacggacaagcgcgcctggctggaactgatagccgatggtcatcatgtgcatccggcggcaatgagcctgtgttgttgctgtgcgaaagagagaatcgtactgatcaccgacgcgatgcaggcagctgggatgccggatggtcgctatacgttatgtggtgaagaagtgcagatgcacggtggcgttgtccgtaccgcgtctggtgggctggcgggcagtacgctgtctgttgatgcggcagtgcgcaatatggtcgagttgacgggcgtaacgcctgcggaagccatccatatggcgagcctgcatccggcgcgaatgctgggtgttgatggtgttctgggaagccttaaaccgggcaaacgcgccagcgtcgttgcgctggatagcgggctacatgtgcaacaaatctggattcagggtcaattagctagcttttgatagtttgctcctttattgggccttcacttcccccgtaaggcctttctttttctttcgttttgatctgtgcagcggtgtcggatgcgacgctaacgcgtcttatccgacctacagttggtgaccgcaaggccggataaagcgtttgcgccgcatccagcaatcccttttgcttcctttatcttttctttcaacgatcacaaatttcgttttatttcttttttctccattgaactttcagtttcttttctatagattttaatcaacgaaagacatcaccaagtgaaatgaaacgaaaggcaagtgaaagcgacaacgcccgacgtcaagttcatcagactaaggattgagttatgccagaaaattacacccctgctgccgccgcaaccggtacatggactgaagaagagatccgccatcagcctcgcgcatggatccgtagtctcaccaacatcgacgcgctacgttccgcgctcaataacttccttgaaccgttactgcgcaaagagaatctgcggatcatcctgaccggagccggaacgagcgcatttatcggtgacatcatcgcgccgtggctcgccagccataccggtaaaaacttcagcgccgtaccgaccaccgatctggtcaccaatccgatggactacctgaacccagctcatccgctgctgttgatctccttcggtcgatccggcaacagcccggaaagcgtcgcagccgtggaactggcaaatcaatttgtaccggaatgctatcacctgccgatcacctgcaacgaagcgggcgctctttaccaaaacgcgatcaacagcgataacgcgtttgccctgctgatgcccgcagaaacgcacgatcgcggctttgcgatgaccagcagcattaccaccatgatggccagctgcctcgcggttttcgcacctgagacgatcaacagccaaaccttccgcgacgtggcggatcgttgccaggcgatcctgaccagtctgggcgatttcagcgaaggtgtgtttggttacgcaccgtggaaacggatcgtttatctcggtagcggtggcttacagggcgcagcacgcgagagcgcgctgaaagtgctggaactgacggcgggtaaactggcggccttttatgattctccaaccggattccgtcatggaccaaaaagcctggtcgatgacgaaacgctggtggtggtatttgtctccagccacccttacacccgtcagtatgatcttgatctgctggctgaacttcgccgtgacaaccaggcaatgcgtgtaatcgccatcgccgcggaaagcagcgacatcgtcgctgccggtccacatatcatcctgccaccgagtcgtcactttatcgacgttgagcaggcattttgcttcctgatgtacgcccagacgtttgcactgatgcagagcctgcacatgggcaatacgccggataccccaagtgccagtggcaccgttaaccgcgtggtgcaaggcgtaatcattcatccgtggcaggcataagaggatcgcattatgagcattatctccactaaatatctgttacaggacgcccaggccaatggctacgcggtgcctgcttttaacattcataacgccgagacgatccaagcgatcctcgaagtgtgcagtgaaatgcgaagcccggtgatcctcgccggaacgccggggacctttaaacacatcgcgctggaagagatctacgccctgtgtagcgcctattccacaacctacaacatgccactggcgctgcatctcgaccaccacgaaagcctggatgatattcgccgtaaagtccacgcaggtgtgcgcagtgcgatgatcgacggcagccacttcccgtttgccgagaacgtgaagctggtgaaaagcgttgttgacttctgccacagtcaagattgcagcgtggaagcagaactgggccgcctgggcggtgttgaagatgacatgagcgttgacgccgaaagtgcattcctgaccgatccacaagaagctaaacgctttgtcgaactgactggcgtcgacagcctggcggtagcgattggtacggcgcacggcttatacagcaaaacgccgaagattgatttccagcggctggcggaaattcgtgaagtggtggatgttcctctggtgctgcatggtgccagcgatgttccggatgaatttgtccgtcgcactattgaacttggcgtcacaaaagtgaacgttgccacagaattaaaaatagccttcgctggcgcggttaaagcctggtttgcggaaaatccgcagggtaacgatcctcgttattatatgcgcgtcggaatggatgcgatgaaagaagttgtcagaaataaaattaatgtctgtggtagtgcgaatcgaattagtgcataatcattagttttttatgatttatcccaatgtacttcccgattaatatcggggagtgccttaatggaaaaggagataactaaaccttaataaatacatcactacaatatcgcaacaataatatatttaaaaaaattatattattcaactttatggtgaggattacacaatgaccagtccaaatattctcttaacccgtattgataaccgtctggttcacggtcaggttggcgtgacctggacatccaccatcggtgcaaatctgctggtagtcgtggatgatgttgtcgctaacgatgatattcaacagaaattaatgggtattaccgcggaaacctacggctttggcattcgtttctttactatcgaaaaaaccattaacgtcatcggcaaagctgcaccacatcagaagatcttcctgatttgccgtacgccacaaacggtacgtaaattggtagaaggtggtattgacctgaaagatgtcaacgtcggcaatatgcatttcagcgaagggaaaaagcaaatcagcagtaaagtttatgtcgatgaccaggatctcacggacttacgttttattaaacaacgtggcgtgaatgttttcattcaggacgtccctggcgatcaaaaagaacaaatccctgactaaatctaaaatcgccttaatattggtttgaggtaataaaaatgcatgaaataaccctacttcagggattatccctggcggcgttagtttttgttctggggattgatttttggctggaagccttatttttattccgcccgataatcgtttgtaccctaactggcgctattctcggtgatattcagactggcttaattaccggtggtctgacagagttggctttcgccggattaacccctgcaggtggtgttcagccgcccaacccgattatggcgggtctgatgaccaccgtcattgcatggtctacgggcgttgatgccaaaacagcaattggtcttggcctgccgtttagtttgttaatgcagtacgtcattctgttcttctattccgctttcagtttatttatgaccaaagccgataaatgcgcgaaagaggcggatacggcagcgttttcccggcttaactggacaacgatgctcatcgtcgctagtgcgtatgcggtgattgctttcctctgtacttacctggcacagggggcgatgcaggcgctggtgaaagcgatgcccgcctggctgacccacggctttgaagtggctggcggtattctgcctgccgttggttttggcttgctgctgcgcgtaatgttcaaagcgcaatatatcccttacctgatcgccggtttcctgtttgtttgctacatccaggtcagcaacctgttgccggttgccgtactgggcgcaggctttgcggtgtatgagtttttcaatgcgaaatcccggcagcaagcgcaaccgcagcccgttgccagtaaaaatgaagaagaggactacagcaatgggatctgaaatcagtaaaaaagatatcacccgtctgggctttcgtagcagcctgctgcaagcgagctttaactacgaaaggatgcaggcgggcggttttacctgggcgatgttgccgatcctgaaaaagatttataaggacgacaaaccgggcttaagcgcggcgatgaaagataacctcgaatttattaatacccacccgaatctggtcggattcctgatggggttattaattagcatggaagaaaaaggagaaaaccgcgacaccattaaaggcctcaaagtggcactgtttggcccaatcgccgggattggcgatgcgattttctggtttactttgttgccgattatggcgggaatttgcagtagttttgccagccagggaaacctgctggggccgattctatttttcgccgtttacctgcttatctttttcctgcgcgtcggctggacccacgtcggttatagtgtcggcgtgaaggcgatcgataaagtgcgagagaacagccagatgattgcccgtagcgcaaccatcctcgggatcacggtaatcggcgggctgatcgctagctatgtgcatattaacgtggtgacaagctttgccatcgacaatacccacagcgttgcgctgcagcaggatttcttcgataaagtcttcccgaacattttaccgatggcctacaccctgctgatgtattacttcctgcgggtgaaaaaagcgcatccggtgctgttaatcggcgtgacttttgtgctctctattgtttgttccgcattcggcattttgtaaatggaacgaggcactgcgtctggtggtgcctctttacttaaggaatttcatcctgtgcaaacccttcagcaagttgaaaactatacggcgttaagtgaacgtgccagcgaatatttattggccgtgatccgtagcaaaccgaatgccgtgatttgcctggcgaccggagccacgccattactgacgtatcattatctggtagaaaaaatccaccagcagcaggttgatgtcagccagctcaccttcgtgaagctcgacgaatgggtggatctgccattaacgatgccaggcacctgcgaaactttcctgcaacagcatatcgtgcagccgctggggctacgtgaagaccagctcatcagctttcgctccgaagagataaatgagacagagtgcgaacgggtaacgaacctgattgcgcgcaaaggcggtctggatttatgcgttctcggattggggaaaaacggtcatcttgggctgaacgaaccgggagaaagcctgcaaccggcctgccatatcagtcaacttgatgccagaacacagcaacatgagatgttaaaaaccgcgggtcgccccgtgactcgtgggatcaccttaggcctgaaggatattctcaatgcccgcgaagttttgttactggtgactggcgaaggaaagcaggatgcgacagatcgttttctcacggctaaagtctctaccgctatcccggctagttttttatggctgcacagtaactttatttgtttaattaacacctaaccagatgaaaaatttgctcaaaatgtttaaattaacttatgtaacagtcacgcattatattaaataacatttgactgggttgaacataacgccgatagcaaaaggagttatgttcaacaatttaattttagatatacatataacttgttctattaataaatcacctcgtattctgactcgccccctggcgcagcaaagtcaggcatttatactcttttgaatacatagaaaattgatatcaatataatgaaaatatcaaatatttgcatataaatataatcttaaagttcagtctatttaatgttcaatgaaatatttctgcctgtataatctttaaagatgttgaacatatattcacattaaatatgattatgtacttgttacaaggataaggttatatatgaataaagttacaaaaacagctattgcgggcttacttgcgcttttcgcaggtaatgccgctgcaaccgatggtgaaatagtttttgatggcgagattttaaaatccgcttgtgaaatcaatgactctgataagaaaattgaagttgctcttggtcactataatgccgaacagtttcgtaatattggcgagcgtagcccaaaaattccattcactattcctttagttaactgcccaatgactgggtgggagcacgataacggcaacgttgaagcgtctttccgtctatggctggaaacgcgagataatggcaccgtccctaacttccctaatctggcaaaagtaggctcttttgctggcatagcggcaacaggtgtgggtatccgtattgacgatgcggaaagcggaaacattatgccactgaatgctatgggcaatgataacacggtttatcagatcccggcggaatccaatggtattgtcaatgttgacctcatcgcttactacgtaagtaccgtagttccaagtgaaatcaccccaggggaagcagacgctatcgttaacgtaacgctggattaccgttaatacgttagggcgttatctgacctgtcagataacgcccttttccttcctctttctcgttgtatcaggttgaaaaataactatgagtaaacgaacattcgcggtgatattaaccttgttgtgtagcttctgtattggccaggcgcttgcaggaggaatcgttttacagcgaacgcgagtgatctatgatgccagccgcaaagaggctgcgttacctgtcgcaaacaaaggcgcagaaacgccttatttactgcaaagttgggtagataatatagatggtaaaagccgtgccccatttattataaccccaccgctatttcgtcttgaggctggcgatgacagtagtctgcgaattattaaaacagctgataacctgcctgaaaataaagagagcctgttctacattaatgttcgtgccattccagcaaagaaaaaaagtgatgatgttaatgctaacgagttgacgctggtatttaaaacacggatcaaaatgttttatcgccccgcacacctgaagggacgggtaaacgatgcgtggaaaagtctggaatttaaacgtagtgaccatagtctcaatatatataacccaactgaatattacgtcgtatttgccggactggcagtcgataaaaccgatctcacaagcaaaattgaatatatcgcgcccggagaacataaacagttaccacttcctgcatctggcggaaagaacgtgaaatgggctgcgatcaatgattatggcggcagttccgggacagaaactcgtccactgcaataaaaaatataaaaacacaggtcatcagggaatgccacaacgacaccaccagggacataaacgcacaccgaaacagttggcgctcatcatcaaacgttgtttgccgatggtgctcactggcagcggcatgctttgcactaccgctaacgccgaagagtattatttcgaccccattatgctggaaaccacaaaaagtggtatgcaaacaaccgatctgagccgttttagtaaaaaatatgcacaactaccaggaacttatcaggttgatatctggctgaataaaaagaaggttagtcagaaaaaaattacatttaccgccaatgcagagcaacttctgcagccacagtttacggtagaacaactacgtgagctgggtattaaggtggatgaaatcccggcgctggctgaaaaagatgacgatagcgtgatcaacagccttgaacaaatcattcccggtacagctgctgaatttgatttcaatcatcagcaacttaatttgagcattccccaaattgcactgtaccgtgatgcaagaggttacgtctccccttctcgttgggacgatggtataccaacgctgtttaccaactacagctttacaggttctgataaccgttaccgccagggcaatcgtagccaacgacagtacctgaatatgcaaaatggtgctaattttggcccctggcgattacgcaactattccacatggacacgcaacgatcagacaagtagctggaataccatcagtagttatttacaacgtgatatcaaggcgttgaagtctcagttgcttctgggagaaagcgccaccagcggcagtattttttccagctacacctttactggcgtgcaactcgcttccgacgataatatgttgccaaacagccagcgcggatttgccccaacggtacgcggtatcgcaaacagtagtgcaatcgtgactatcaggcaaaatggttatgtgatctatcaaagcaacgtgagtgcgggtgcctttgaaattaacgatctctacccctcttccaacagcggcgatttagaagtcacgattgaagaaagtgacggtacacaacgtcgctttatccagccttattctagtttacccatgatgcagcgacctgggcatctaaagtatagcgcgaccgctggacgctatcgcgctgatgcaaacagtgatagcaaggaacccgaatttgctgaagccacggcaatatatggtttgaataatacttttacgctgtatggcggcctgctcggttctgaagattattatgcgctggggatcggtatcggcggcacacttggcgcactgggcgcgttgagcatggatatcaacagagctgacacccaattcgataaccagcactcttttcatggctatcaatggcgtacgcagtacatcaaagatatcccggaaaccaacaccaatatcgctgtcagctactatcgctataccaacgatggctattttagttttaatgaagccaatacccgcaattgggactataacagtcgccaaaaaagtgaaattcaattcaacatcagccagacaatatttgatggggtaagtctgtatgcctccggtagccagcaagactattggggcaataacgataaaaacaggaatatctctgttggggtttccggccagcaatggggagttggttacagcctgaattatcaatacagccgctacactgatcaaaataatgaccgcgcactctctttgaatctcagtattccgttagaacgctggttaccgcgtagccgggtttcctatcagatgaccagccagaaagatcgcccaacccaacatgaaatgcgtcttgatggcagtctgctggatgatggtcgcctgagctatagcctggaacaaagtctggatgacgataacaaccataacagtagcctgaacgccagttaccgtagtccttatggcaccttcagtgccggatacagctacggtaatgacagcagccaatacaattacggcgttaccggcggcgtggttatccatcctcatggcgtgacgctcagccaatatctgggcaacgcttttgcgcttatcgatgctaacggagcatctggcgtgaggatacaaaactatccggggattgctaccgatccttttggctatgcagtggttccttatctcacaacttatcaggaaaaccgtctcagcgtagatactacgcagctgcccgataacgtcgatcttgaacaaacaacacagtttgtggtgcccaacagaggtgcaatggtagcggcgcgtttcaacgccaatatcggttatcgcgtacttgttacagtcagcgatcgcaacggtaaaccgttgccctttggcgctcttgccagcaacgatgatacggggcaacaaagtatcgtcgatgagggcggcatactatatctctctgggataagcagtaaaagtcaaagctggactgtacgctggggaaatcaggcagatcaacaatgtcagtttgctttcagtacaccggatagtgaacctacaacctctgtattacaaggcacagcgcagtgccattaaggataaaaaaatgaaaagagcgcctcttataacaggtcttttgttgatatccacatcctgcgcttatgcctccagtggagggtgtggagccgacagcactagcggtgcgacaaattacagcagtgtggttgatgatgttacggtgaaccagacagataacgtgacaggacgggagtttacctctgcaacgctaagtagcactaactggcaatacgcctgttcctgctctgcgggtaaggcagttaaacttgtctatatggtcagccccgtacttaccaccactggacatcagacaggatattacaaactcaatgacagcctggatattaaaaccacattacaggcaaacgacattccaggactcacaaccgaccaggttgtctctgttaacacccgattcacacagataaaaaacaacacggtatattctgctgcaacccaaacgggtgtttgccagggtgatacgtctcgttatggacccgttaatattggtgcgaacaccacctttaccctgtatgtcaccaagccatttctcggcagcatgaccattccgaaaacggatattgccgtcattaaaggcgcgtgggtcgatggaatgggaagcccgtctacaggtgacttccatgatttagtcaagttaagcattcagggaaatctcaccgccccacagagctgcaaaattaatcagggcgatgttattaaggttaattttggattcatcaatggtcagaagtttaccacccgcaatgccatgccagacggttttactccagtagactttgatatcacttatgactgtggtgatactagtaagattaaaaacagcttgcaaatgcgcatcgacggtacaactggggtagtagaccagtacaacctggtcgccaggcgaagaagtagtgacaatgtgcccgatgtcggtattcgtattgaaaatctcggcggcggagttgcaaatattccttttcagaacggtatccttcccgttgatccttccgggcatggcaccgtcaatatgcgcgcctggccagttaatctggtcggtggtgagctggaaacaggaaaatttcagggcacagccaccattaccgtcatcgtgcggtaaaagaagacgttgcgttttgattaacgcaacgcttcggcactgttacccctgctgctccagcgcatacttatacagcgcatttttcttcacgccgtgaatttctgcggccagcgccgccgcttttttcagcggcagttctgcctgtagcagcgccagcgtgcgcagggcatcggcgggtaagtcttcttcctgtgctttatgaccttcgacaatcagcaccatttcgcctttgcgacggttttcatcttcctttacccacgccagcagctcgccaacgggcgcgccgtgaatggtttcccaggttttggtcagctcacgcgccagaaccacgtagcgggattcgcctaataccgcaacgatatcttccaggctatctaacagacggtgggtagattcataaaaaatcagcgtgcgcggctccgcttcaatggcttttagcgcatcacggcggcctttacttttggcaggtaaaaagccttcgtaacagaaacggtcagagggtaaacccgctgcgcttaacgcagtgatagcagcacacggcccgggtagcggcaccacgcggatccccgcttcacggcaggtacgcaccagatggtagccaggatcgttaattagcggcgttccggcatcggaaaccagcgcaatgttttgcccctcttgcagcttcgccagcagcgtttcagctttttgttgttcgttatggtcgtgcagcgcaaacaaccgggcattaatcccaaaatgttgcagcaataaaccggtgtgacgagtatcctcggcggcaatcagatcaacggcctgtaatacctctaacgcacgctgggtgatatccgccagattgccgattggcgtcggtacaatgtaaagctggccctgagaattatccgcgctttggtgttgtttcattgtgtcgtccgtattgccgatttaatattgagcattgcgtaaaaaaaatatcactggatacattatggtacccagtacattttctcgtttgaaagccgcgcgttgtctgcctgttgttctggcagccctgattttcgccggttgtggcacccatactcccgatcagtccactgcttatatgcagggcacggcgcaggctgattctgccttttatcttcagcagatgcagcaaagctctgatgataccaggatcaactggcaattactcgccattcgtgcactggtgaaagaaggtaaaaccgggcaggcggttgagttgtttaaccaactaccgcaagaactgaacgatgctcagcgtcgcgagaaaacactgctggcggtagagattaaactggcgcagaaagattttgctggcgcgcaaaacttgctggcgaaaatcacacctgccgatttagaacaaaaccagcaagcgcgttactggcaggcaaaaatcgatgccagccaggggcgtccttccattgatttactgcgcgcgttaattgctcaggaaccgctgcttggcgcgaaagaaaaacagcagaatattgatgccacctggcaggcgctctcctccatgactcaggaacaggcgaatacgctggtgatcaacgccgacgaaaatattctgcaaggctggctggatctgcagcgcgtctggtttgataaccgtaacgatcccgacatgatgaaagccgggatcgccgactggcagaaacgttatccgaacaatccgggcgcgaaaatgctgccaacgcagttggttaacgtaaaagcgtttaaaccagccagcaccaacaaaatcgccctgctgttgccactgaatggccaggcagcggtatttggtcgcactattcagcaaggctttgaagcggcgaaaaatatcggcactcagccagtggcagctcaggtagctgccgcacctgccgcagacgtagctgaacaacctcagccgcaaaccgtggatggcgttgccagcccggcacaagccagcgttagcgatctgaccggtgaacagcctgcagcccagccggtgcctgtaagcgccccggcgacaagcaccgcagcggtaagcgcacccgcaaatccatccgcagagctgaaaatctacgataccagtagtcaaccacttagccagatcttaagccaggttcagcaggatggcgcgagtattgtggtcggtccgttgctgaaaaataacgttgaagagttgctgaagagcaacactccgctgaacgtactggcactgaaccagccggagaatatcgaaaatcgcgtcaatatttgttacttcgcgcttagtccggaagacgaagcgcgcgatgcagcgcgtcatattcgtgaccagggtaaacaagcgccgctggtgctgatcccacgcagtagtttgggcgatcgcgtagccaatgcgtttgcgcaagagtggcagaaactgggcggcggcaccgttctgcaacaaaaatttggttccaccagcgaattacgcgcgggtgttaacggcggttctggtattgctttaacgggtagcccgattactctcagagcgacaaccgactccggcatgacgaccaacaatccaacgctgcaaaccacgccaaccgatgaccagttcaccaataatggcggtcgtgtcgatgcggtgtacattgtggcaacgccgggtgaaatcgcttttatcaaaccgatgatcgccatgcgtaacggtagccagagcggtgcaacgctgtacgccagctcccgcagtgcgcaagggaccgctggcccggatttccgactggagatggaaggcttgcagtacagcgaaatcccgatgctggcaggcggtaatctaccgttaatgcagcaggcactcagcgcggtgaataacgattatagtctggctcgcatgtatgcgatgggcgtcgatgcctggagcctggcaaatcatttcagtcaaatgcgccaggttcagggttttgaaatcaacggtaataccggaagcctgacggctaacccggattgcgtgattaacaggaacttaagttggctacagtaccaacaaggtcaggtagtccccgtcagttaaattaagtgattaacaggaacttatcatggctacagtaccaacaaggagtggtagtccccgtcagttaaccaccaaacagaccggcgatgcgtgggaagcacaagcgcgtcgctggctggaaggcaaaggactgcggtttatcgccgctaacgtgaacgagcgtggcggcgagatcgatctgataatgcgtgaaggccggaccaccatttttgtcgaggtacgctatcgccgctctgcgctttatggcggcgcggcagccagtgtgacccgcagcaaacaacacaaattattacagactgcccgcttgtggctcgcgcgtcataatgggagttttgatactgtggattgccggttcgatgtggtagccttcaccgggaatgaggttgagtggattaaggatgcctttaatgaccacagttaattaaggtttaaggattagcgtgcaagaaagaattaaagcttgcttcactgaaagcattcaaactcaaattgcggcggcagaggcgcttccggatgccatctcccgtgcagccatgacgctggttcagtctctgctcaatggcaacaaaatcctctgttgtggtaatggaacttccgctgccaatgcacagcattttgctgccagcatgatcaaccgtttcgaaacggagcggcccagcttacctgccattgcactaaatactgataatgttgtcttaacggcgattgccaacgatcgcttacatgatgaagtgtatgcaaaacaggtgcgggcgctgggtcatgcgggagatgtattgttagccatttccacccgtggcaacagccgcgatattgttaaagcagttgaagccgccgttacgcgtgatatgaccattgtggcattgaccggctatgacggcggcgaacttgcaggtttgttagggccacaggatgtggagatccgcattcctagccatcgtagtgctcgcattcaggaaatgcatatgctgacggtaaattgcctgtgcgatctgatcgataacacgcttttccctcaccaggatgattaaggagaatacatgaaggcattaagcccaatcgcagtccttatttccgcgctgctgttgcaaggttgtgttgccgctgccgtagtgggtaccgctgctgtgggtaccaaagccgcaactgacccacgcagtgtcggcacccaggtggacgatggtaccctggaagtgcgcgtgaacagcgcattgagcaaagacgaacagattaagaaagaagcgcgcattaatgtaacggcctatcagggcaaagtgctgctggttgggcagagtccaaatgctgaacttagcgctcgcgccaaacagattgctatgggcgtagacggtgccaacgaagtgtataacgagattcgtcagggccagccgattggtctgggcgaagcatctaacgatacgtggatcaccaccaaagtgcgtagccagctcttaaccagcgacctggtgaaaagctccaacgtgaaagtgaccaccgaaaacggtgaagtgttcctgatggggctggtgactgaacgtgaagcgaaagcggcggcagatattgccagccgggtgagcggcgtgaagcgggtaactacggcgtttacgtttattaaataacagccccttgtaatgcctgatgcgacgcttgccgcgtcttatcaggcctacaacgatacaaaccgtaggtcagataaggcgtttacgccgcatccgacatgttttccctcaaatcagaacaacagcgccagcccgccgacaatcacaccagacactgccaccatcgcccctgtcagccataaggctttcgccgggaacgctttgcgcagcataatcagactcggcaaactcactgccgggagcgtcatcaacaatgccagcgccggagcggttcccatacctgccagcatcatcgtttgtacaatcggaatttctgctgccgtgggaatgacaaacaagcatcctgctaccgccatcgccaccacccacatcaggctgttatcgacagcaccatcggcatgggggaataaccagacgcgagcggcacccaacaccagtactgcaaggatgtaaaccgggatcgtactccagaaaagcgtccatagcgccctgccccagcggctaaaaaacccgccctgtgcttccggtatgtcaatttcgaccggtgcctgcgtttgcggtgtttcacgcacccatttttgcaccagcgtcgcaatcagcaacaccatcaccagcccggccaccagacgaatcgccgcaaaaccccagccgaggacaaagcccataaacaccagcgtcgccgggtttaacaccggattgcccatccagaatgccagcgcaccgcccatgctcacctgttggcgacgcattcccgccgcgaccggagccgcacagcaggtacacatcatgcccggcaagctaaacagcgttcccagcagcgtgccgcgaaagcggctttgcccaagcgtacgcaacaaccagtcacgcgggatcagcacctgaatcaagctaccgaggatcacccccagcaccgccgctttccataccgcgaggaaatagatcatcgcgtaatccaacgccgcctgccatgggttagcatccgcctgcgcaaggatagatttaccgatactgtgggtttcggcagcagtaaacgctttgccgtagtaaggttcccatttcacataccagagaccggcaatgacaacgagaaagaaaagcgcgggtttccaccactgaatgggcgttgccgcctgagaactagactgaccagtcatagcattccccaggaataagttatgataattgagcgcgtgaatattacgctcactatcaattcttgggaataattattcagctcttttgcgtaattcactagagcttaaaatcgtcacgccttcatgctcaggccgcatgctctctgccagcatgacccgcgccacgtctctcgcatcaatggatttccagttacctggtaacaaacggaacagcggcgcaaaaagcgtttcgttcatccgctgtttgctacgatcgcccagtaacatgctcgggcgagcaatggtcaatttcggccagttctgggcgattaatgcttcttccatctcccctttgacgcggttatagaaaaacgggctgtgggcattggcacccatcgcactgactaccaacatatgctgcgcgcccagtcgccgcccggttaatgcggtatccactaccagcgtgtaatcggcatgaataaacgcctctttgctccccgcttctcgccgcgtggtgccgagacaacaaaacacaatgtcgatgggatcggtgacctgcgccaacgcgtcactcagttgcggatcatggggattaaacaccccgggcatatcgcccaacggacgtcgcgtcggcgcagcaatggcgttaactttcggttcgttaatcaacatccgcagcaggtgaccgcccaccagccccgttgcgcctgtaatcagtacctgactcatcttcgctcctttacagaattgtctgccttgcgctccacggctcatgcaccaggcttaatagaccatgaggtaattatccccgattgtgggaaattcgcctcatccaatgcaacaacgcggaggaagcatgagtaagaaaattgccgttttaatcactgatgaatttgaggatagtgaatttactagtcccgcagacgagttccgtaaagccggacacgaagtgattaccattgaaaaacaagcgggtaaaacggtgaaaggcaaaaaaggagaagccagcgtgaccatcgataaatccatcgatgaagtgacgcctgcggagtttgatgccctgctgctaccgggcggccatagtccggattatctgcgtggggacaaccgttttgtcacctttacccgtgattttgtgaatagtggcaaaccggtgtttgccatctgtcacggcccgcagttgctgatcagcgccgatgtgattcgggggcgcaaactgaccgcagttaaaccgatcattattgatgttaaaaatgcgggcgcggaattttacgatcaggaagtcgtggttgataaagatcagctggttaccagccggacaccggacgatctgccagcgtttaaccgcgaggcgttacgcctgctcggtgcctgattacgcctgctcggtgccactgtcgcgtagccaaatcatttttttaccaaagcccagcgtgttgtcggtgaatttgatttcatcgagccggatttcccacaccggggcgctcagcattctggcaaccggaaagcgacgattgtacgccttgcgcgcgaggtcgctttcctcaccttccagcctgcggatctcacctttaaactgcacaccgcgaattaacgctaccgttttcggctgaccgtttaccgttccggcaaccgcagcctgcggcccactcatctgcgcgtggcgcgttttttcttccgtcaaaatgtagaaggcgactttctgcgcatcaaaaagataaaaggcattagcgcaccagagttccccttcctgctgcacacaccaagtgacaacatgttgttttgccagccaacggctgatggcgatgagtgtttccattgctgttctcttttatactgtgggcctgaccttaacatgcgacgcagacgatgacaccctggtttctttacttgatccgtaccgccgacaataagctttataccgggatcaccacggatgtcgaacgccgctatcagcagcaccaaagcggcaaaggggcgaaagcactgcgcgggaaaggagaactaacgctggtgttttccgcgccagtgggcgatcgtagcctggcgttacgggcggaatatcgcgttaagcaactgaccaaacggcaaaaagagcgtctggtagcggaaggcgcagggtttgcagagctgttaagcagtctgcaaaccccggagattaaaagcgattgaaatgctcgtgatactcaaccaggccggtaacgccattcagcgcgtcatccgctaaacgatgtacctggaaggcgctttcagtgcccggccagcggcaacgcagatcgtgatgcgccgccagttcaaagccgaaacgactgtacagcgccggatcgcccagcgtcaccactgcggcatagccgaactcattaaggctatcgagtccttcatagaccagttggcgtgccagcccctgtccacggtatttttcatcaaccgccaacggtgccatgccgacccattgcaggtcttcgccctgcacatcaaccggactaaatgccacatagccaatgacctgaccttcgtcatctgtcgccaccagccccagcgtcagaaagccatcttcacgcagatcgtgaaccagcttcgcttccgcatcactttcgaaactgcgacgcagcagggcatcaatacccggcgcatcaatgggaatttctactcgaattagcatggttcacctacgcttgtctgtttggtttcaggcgcggttttcattcccgcctcaacaaaatccgccagttgcagcagcatcatgcgtaaggctttcggcatttgctccagttcaatggcgtccatcaggtttttcacatacagccccagctccgtatcgccttcaatcaccagccgacgctggaagaagagcgtatccggatcttgtttacgcgccgcaatcatcagcagatcgctggcgtcggcactaaaactcacatcagcttgcgcgttctggctaacgaccagtttgccattcaccacgctggtaaaccattgcaggtcaatatcacgcacatgaatacttaaccagcggccttcaagaaactccagctcgccatcatccagcgcctggcggaattgccagcttaagacctgctcaagaacctggcgttttagcgcaaatggcgtcagttttaccggtacactcaacagagatggccccaaatgcacaatacgggaacgcagtttatccaacacgagttttactccctgtttcaacaatcatcctattttgccatatcagaaaaataacatagcggtataaatcaacaattccatatgaaattgctgctaccaccaatacaactttaactgccttaaatcaaaaattgtcgcagcaaggttaactaaaatcccagttcgttaacatttttgcgttttgatagcgcaaccttcaggaaaaattatggagctgctctgccctgccggaaatctcccggcgcttaaggcggccatcgaaaacggcgcagatgctgtttatatcgggctaaaagatgataccaatgcccgtcacttcgccggccttaactttaccgagaaaaaattgcaggaagcggtgagttttgtccatcaacatcgccgcaaacttcacatcgcgattaacacttttgcgcatccggacggttacgcccgttggcagcgcgccgtggatatggcggcgcagctgggtgccgacgcgctgatcctcgccgacctcgccatgctggagtacgccgccgagcgttatccgcatattgagcgccacgtaagcgtgcaggctagcgcgaccaatgaagaggcgattaacttttatcatcgccattttgacgttgctcgcgtggtgctgccgcgcgtgttgagcattcatcaggtgaaacaactggcacgggtcacacctgtaccactggaagtctttgctttcggcagcctgtgcattatgagcgaaggtcgttgctatctgagcagctatctgacgggtgagagccccaacaccataggcgcgtgttctccggcccgtttcgtgcgctggcaacaaacgccgcaggggctggaatcccgcctgaacgaagtgctgatcgaccgttatcaggacggcgaaaacgcaggttatccgacgctatgtaaagggcgttatctggtggacggcgagcgctatcacgcgctggaagaaccaaccagtctcaataccctggaactgctgccggagttaatggcggcgaatattgctagcgtgaaaattgaaggccgccagcgtagcccggcgtatgtcagccaggtggcgaaagtctggcgtcaggctatcgaccgttgtaaggccgatccgcaaaactttgtaccgcaaagcgcgtggatggagacgctcgggagcatgtccgaaggcacgcaaaccactcttggcgcatatcaccgtaaatggcagtgagaaaagcaatgaaatattccttagggccagtgctgtggtactggccaaaagagacgctggaagaattttatcagcaggccgccaccagcagcgccgacgtgatttatcttggtgaagcggtatgcagcaagcgtcgggcaaccaaagttggcgactggctggagatggcaaaaagcctcgccgggagtggtaagcagattgtgctctccacgctggcgctggtgcaggcaagttctgaactgggcgaactgaaacgctatgttgagaacggtgagtttctgattgaagccagcgatctcggcgtggtgaatatgtgcgctgaacgcaaactgccgttcgtcgccgggcacgcgctgaactgctacaacgcggtgacactgaaaatattgctcaaacagggcatgatgcgctggtgtatgccagtggagctttcccgcgactggctggtgaatctgcttaatcagtgcgatgagctgggcattcgtaaccagtttgaagtggaagtcctgagctacggtcatctgccgctggcctactccgcccgctgctttaccgcgcgtagcgaagaccgcccgaaagatgagtgtgaaacctgctgcattaagtatccgaacgggcgcaacgtgctgagccaggaaaaccaacaagtgtttgtactcaatggcattcagaccatgagcggctacgtttacaacctcggtaacgagctggcatccatgcagggcctggttgatgtggtccgcctgagtccgcagggtactgacactttcgcgatgctcgacgccttccgcgctaatgaaaatggcgctgcaccactgccgttgacggcgaacagcgactgtaacggctactggcggcggctggcaggactggagctgcaagcctaagtaaatagctcactttgttaacaactttaactactctttaatgcagtattaaagattaatcggtaacaaagtgagctgttatgactgataaaaccattgcgtttagcctactcgatctggcccccattcccgaaggttctagtgcgcgagaagcattctcccactctctcgatctcgcccgtctggctgaaaagcgcggctatcatcgctactggctggcagaacaccacaatatgactggcattgccagtgctgccacgagcgtattgatcggctatctggcggcgaataccaccacgctgcatctggggtctggcggcgtgatgttgcctaaccacagtccgttggtcattgcagaacagttcggcacgcttaatacactctatccggggcgaatcgatttggggctgggtcgtgctccgggtagtgaccaacggacaatgatggcgctacgtcgtcatatgagcggcgatattgataatttcctccgcgatgtggcggagctggtggactggtttgacgcccgcgatcccaatccgcatgtgcgcccggtaccaggctatggcgagaaaatccccgtgtggttgttaggctccagcctttacagcgcgcaactggcggcgcagcttggtctgccgtttgcgtttgccagtcacttcgcgccggatatgctgttccaggcgctgcatctttatcgcagcaacttcaaaccgagtgcacggctggaaaaaccatacgcgatggtgtgcatcaatattatcgccgccgacagcaaccgcgacgctgaatttctgtttaccagtatgcagcaagcctttgtgaagctgcgccgtggcgaaaccgggcaactgccgccgccgattcaaaatatggatcagttctggagtccgtctgagcagtatggcgtgcagcaggcgctgagtatgagcttggtaggtgataaagcgaaagtgcgtcatggcttgcagagcatcctgcgcgaaaccgacgccgatgagattatggtcaacgggcagattttcgaccaccaggcgcggctgcatagctttgagctggcgatggatgttaaggaagagttgttgggataatgtgtcttaacgcgggaagccttatccgagctggcaacgctgtcctacatagacctgataagcgaagcgcatcaggcattgtgtaggcagcagaaatgtcggataaggcaccgctgattactgatacaccggcagtaaattaaagctgcttaaaatatgcaccagtgcgttgccgacgccaaacaccagaatcagcgcaatcatcggcttgccaccccagacgcggaatttcgggctgccaaagcgtttacggcttgcacgggctaacagcgccggaacaattgccgcccagatggtagccgctaaaccagcataaccaatggcgtacaggaatccgttcgggaacaacagcccccccacaactggcggggcaaaggtcagcaatgccgttttcaagcggcccacagcgctgtcgtcgaaaccaaacagatctgccagatagtcaaacaaacccagcgttacgccgaggaagctactcgctaccgcaaagttactgaacacgaccagcagcagatccagactacggctgttcagtacgccgcttaacgcctgtaccagcacatcaatattaccgcccttctctgcaataccgataaactccggacgcgggatgttacccatcgtcgccagcaaccagatggtatacagcgccagcgccatcagcgtaccgtacaccagatatttcacgatggttttcggatctttgccgtaatacttcatcaggcttggcacgttaccgtgataaccaaagcttgccagacagaacggcagggtcatcaacagatacggtgcataagacgcattgctttcggcgacgttgaacaatgtcgcaggctgcacatgccccagcaggctaccaaaggtgaggaagaaggtaatgactttcgcccccagcacaatcgctgtcatgcgactgacggctttagtgctcaaccacaccacaaacgctaccagcaatgcaaaaccaaaacccgccgcccgtgccgggacgtttagactcatctctgcgaaggtgtgatgcagaatgctaccactggcagaaatataggcataggtcaggatatagagcacaaaggcaatggaaatgccgttgaccacgttccagcctttgcccagcaaatctttggtgatggtgtcaaaactgctaccgattctgtaattcaggttagcttccagaatcatcaagccggaatgcagcatacagaaccaggtaaagatcagcgccgccatactccagaaaaaccacgccccggacatgaccactggcagagaaaacatccctgcgccaataatggtgccgccgataatcaccacgccgccaagcaggctcggactcgtttgggtggtggttagtgttgccatgagggcttctctccagtgaaaaatagtgcgactgcgttgttatgcattgcactgtaccagtacacgagtacaaaagacagaaaaaaagccccgatggtaaaaatcggggctgtatatattattttacagattgtgttcgctgttcagcgatgattacgcatcaccaccgaaacgacgacgaccggtagaatcatcacgacgcggagcgcggccttcacgacgttcgccgctaaaacgacgaccatcaccacggccaccttcacggcgttcaccgctgaagttacgaccgccttcacgacgttcgccaccgaaaccacgaccaccgccacgacgctcaccgccagtatgcggctgtgcatcgcccagtaactgcatgttcatcggcttgttgagaatgcgagtgcgcgtaaagtgttgcagcacttcacccggcatacctttcggcagttcgatggtggagtgagaagcaaacagcttgatgttaccaatgtaacggctgctgatgtcgccttcgttagcaatcgcaccaacgatatgacgaacttcaacaccatcatcgcggcccacttcaatgcggtacagctgcatatcgccaacatcacgacgttcacgacgcggacgatcttcacggtcaccacgcgggccacggtcgttacgatcgcgcggaccacggtcatcacggtcacggaattcacgtttcggacgcatcggcgcatctggcggtacgatcagagtacgttcaccctgtgccattttcagcagtgccgcagccagagtttcgagatccagctcttcaccttcagcagtcggctgaattttgctcagcagtgcgcggtattgatccagatcgctgctttccagctgctgctgtactttagcggcgaatttttccagacggcgtttgcctagcagttctgcgttcggcagttctacttccggaatagtcagcttcatagtacgttcaatgttgcgcagcagacgacgctcgcggttctcaacgaacagcagcgcgcggccagcacgacccgcacgaccggtacgaccgatacggtgaacgtaagactcagaatccatcgggatatcgtagttaactaccaggctgatacgctcaacgtccaggccacgggctgcaacgtcggtcgcaatcaggatgtccagacgaccatctttcaggcgttccagtgtctgttcacgcagcgcctggttcatgtcaccgttcagcgcggcgctgttgtagccgttacgctcaagagcttcagccacttccagagtcgcgtttttggtacgaacgaagataatcgccgcatcaaaatcttccgcttccaggaaacgtaccagtgcttcgtttttgcgcataccccagacagtccagtagctctggctgatgtcaggacgggtagtcacgctggactgaatgcgcacttcctgcggctctttcataaagcggcgggtaatgcgacgaatcgcttccggcatggttgcagagaacagagcggtctgatgaccttccgggatctgcgccataatggtttcaacgtcttcgatgaagcccatgcgcagcatttcgtcagcttcatccagaaccagaccgctcagtttagagaggtccagagtgccacgtttcaggtggtccagcagacggcccggagtaccgacaacgatctgcggcccctgacgcagggcgcgtaattgcacgtcataacgctggccgccgtacagagcaaccacatttacgccgcgcatgtgtttagagaaatccgtcattgcttcagcaacctgtaccgccagttcgcgggtcggtgccagcaccagaatctgtggtgctttcagctcaggatcaagattctgcaacagaggtaaagagaatgctgcagtttttccgctccccgtctgggccatacccagaacgtcgcggccattcagcagatgtggaatacactctgcctgaattggagatggtttttcgtaacccagatcgttaagggcttcaaggataggagccttcaggcccagatctgcaaaagtggtttcgaattcagccatgtagtacgtgtgcctcaaaattaatggcggccagtctacataactcatcatgaaattgatcagcaattttcattgaaaagtgtgaaccggctcaaagtaggtgtattaacgaacaacaacgccctcacccgttaaggtgatggcaatcaaaaaagattacgggctgatgtgtacgtcagttattgctggtcgctttctgccaggtcatcttggtcctggcccaggaggcttaattccaacaatgcgtatcggtgctcaacaaagttatgaacgttgttggcaaccgccagtttgaacagtgccgtggcgctgtccaaatcccccagacttaggtagtacttacctaaatagaagttggtttcactgagatgctcagcgaggctggtgttatccgttgcgtccgccttgagcctttccattaacgtttgttcgctaatgttgcccaggtagaactcgacaatgttccatccccactgttccttatcgcttttttcgaagtgctgtttcaacacttctttagcctgcttctcatcgagcttctgctcggcgagataaagccacagactacggaaaggatcattgggatcgtcttgataaaacgccagcagatcatcttgcgctaacttgtcacgaccgccgtaatataatgcgatcccgcgattcaagtgcgcgtagttgtaagttggatcaagctcaagtacagaatcaaacgcttcataggcagcatcaaaattgcctgcctgcgttaaatatatgcctaagtaattgaatacttcaggcatatccggtcggattgccagcgcttggctaaaatcgttacgcgctaatgccctcagaccgagactatcatacaacactccgcgctcatataaaagctgtgcgcgttcgtcatcggttaaagcccgactggcaaggatttgttccatacgtgccagaatcacttcctgctgtaaagtcggttgcaatggtaccgcgaggacttcacttttacgccaggaagtattactgcatcctgcaagcgtaagtgctgtcgcaacgaaacaccagcgcaaaaaaggcttcatttcccactcccgaagaccacggttgaatgaacgtcctgttcccggttgctaacaaggcgtcctgcccggttaaaagccccccgccgcagcggagggcaaatggcaaccttactcgccctgttcagcagccggagcttccggtgctgcagcaggttgagactgctcagtcgcttctttaatgctcagacggatacggccctggcgatcaacttccagaactttcaccggtacttcctgacccatctgcaggtaatcggtcactttctcaacgcgtttgtcagcgatttgagagatgtggaccagaccttctttaccgccgccgatggcaacaaatgcgccaaagtcaacgatacgggtcactttaccagtgtagacgcggcccacttcgatttctgcagtgatctcttcgatacgacgaatagcatgtttcgctttctcgccgtcggtcgctgcaatcttcacagtaccgtcatcttcgatttcgatggtggtgccagtttcttcggtcagagcacggattacagaaccgcctttaccgataacatctttgatcttgtccgggttgatcttgatggtatggatacgcggtgcgaactcagagatatcgccacgcggcgcgttgatcgcctgttccattacgcccaggatatgcagacgcgcacctttagcctggttcagcgcaacctgcatgatctctttggtgataccttcaattttgatatccatctgcagtgcagagataccgtcgcgggaacctgcaactttgaagtccatatcgcccaggtgatcttcgtcgcccaaaatgtcagacagtacaacgtagttgtcgccttctttcaccagacccattgcgatacccgcaacggcagctttgatcggcacacctgcgtccatcagcgccagagacgcgccgcacacggaagccatagaagaggaaccgttggattcagtgatttcagacacaacacgtacggtgtacgggaatttgtccatatccggcatgactgccagcacgccgcgcttcgccagacgaccgtgaccaatttcacgacgcttcggagaaccgaccatgccggtttcgcctacggagtacggagggaagttgtagtggaacaggaaggtatcggtacgttcgcccatcagttcatcaagaacctgcgcgtcacgagcagtacccagcgttgcggtaaccagcgcctgcgtttcaccacgggtgaacagcgcagaaccgtgagtacgcggcagcacgccagtacgcacatccagaccacggatcatatctttttcacgaccgtcgatacgcggttcgcctgccagtacgcggctacgaacaacgtttttctcgatcgcgtgcagaatttcacccagttcgttttcgtccagggtttcgtcttcagcaagcagcgtcgcgatggtttcagatttgatgacatcaacctgcgcataacgctcttgtttgtcggtgatgcggtaagcatcgctcaggcgagcttcagccagtgcagcaacgcgcgcgtttagcgcttcgtttaccggctccggctgccagtcccaacgcggtttaccggcttctttcaccagttcattgatgttctgaataacaacctgctgttgttcatgaccgaacactactgcgcccagcatctggtcttcgctcagcagttgagcttcagattcaaccatcagtacagcggcttcagtaccggcaacaaccagatccagtttgctctctttcagctcgtcctgagtcgggttcagtacgtactggtcattgatgtaacctacgcgggcagcaccaatcgggccattgaacggaataccagacagagacagcgctgcggaagcaccaatcatcgcgacgatatccgggttaacttgcgggttaacagaaaccacggtggcgataacctgaacttcgttgacgaagccttccgggaacagcgggcgaatcgggcggtcaatcagacgcgcgatcagggtttcgccttcgcttgggcggccttcacgacggaagaagctacccgggatacgaccagcagcgtaggtacgctcctgatagttaacggtcagtgggaagaagtcctgacctggtttggcttttttctggccaacaacggtaacgaataccgcggtgtcatccatgctaaccataacagcggcagtagcctgacgagccatcatgccggtttccagagtcacggtgtgttggccgtactggaatttacgaacgatcggattaagcaatgtaatatcctttctctttcttagacagtaccttacggcactggtgttaataccgcttcttctgcgcatcctcgcgactaatgacaaccctaacccagctctatgtgggtaaagcctctcattagccgcgcgaacctctgcaacggaagatcattcatagcaacaatacattagtttccagtgaattgctgccgtcagcttgaaaaaaggggccactcaggcccccttttctgaaactcgcaagaattagcgacgcagacccaggcgctcgatgagctgggtgtaacgtgctacgtctttacgtttcaggtagtcgagcagtttacgacgctgagaaaccatgcgcagcagaccacgacggctgtggtgatcttttttgtgctctgcaaagtggccctgcaggtggttgatctgtgcagtcagcagtgctacctgaacttcggtagaaccggtgtcgtttgcgtcacgaccaaactcagaaacgattttagctgttgcttcagtacttagagacattttaaaactccaaagtatatagaatgaaaggacgccgatctctaattcagcgatcccagtgtacgttacgcaaagtgttaaacaatttacgcgacgttaagcggcagtattctactcgtagcgacctgttatcgcaagacggttaacattacgccgggtattcaaccaccaggcgacgaggcgcaacgcggccttcatcgtcaatttcgcccataccgataaatttgccgttctcaccttccgtgacgcgaaccagtccttccagtggcgcaccagatgtacgaaccgggttaccatttttgaagtaaacagaagacgttaacggaagattcaccaccggatagtcgctagctggactgtccattggcatcagtaatggatcaagtaactccgcggctggaatatcctgctgttcagcttgctcaacaagttcacgcaggtgctccagggtcaccatccgttcaaccggatatttacttaccgccagacggcgcaggtaaataacatgcgcgccacagccgagtttttcacccaggtcatcaatgatggtgcggatataagtgcctttactgcagtgaatttccagctccagctcattgccttcatggcgaataaacagcaattcataaacggtaatcggacgcgcttcacgcggaacttcaatgccctgacgcgcatattcgtacagttttttgccctgatatttcagtgcactatacatgctagggatctgttcgatatcgccacggaaagtatccagtgccgctgccagctgctctgcgctaaaggttaccggacgttcttcaacgatctgtccgtcggcatcagaagtatcggtacgctgtccaagacgcgcaatgacccgatagcgtttgtcggagtccagcagatactgggaaaacttcgtcgcttccccgaggcaaatcggcaacatgccggtcgccagcgggtccagcgcaccggtatgcccggcacggttggcgttatatatacgtttcactttttgcagcgcatcgttgctggacataccctgaggtttatccagcaacaaaacgccgttaatgtcgcgaccgcgacgacgaggacgactcattagtcctccttgctgtcgtccgggttaacacgacgttcttcgtcatgtttgaccacgctggtcaccaggttactcatgcgcatcccttcaaccagagagttgtcgtagaagaaggtcagttccggcacgatacgcaggcgcatcgctttccccagcaggctgcggatgaaaccagaagcttcttgcaacgctttgatgcccgctttaaccgcgtcttcatctttgtcgttgaggaacgtcacatatactttggcatacgccaggtcgcgagacatttcgacaccggaaacggtggtcatcatgcccaggcgaggatctttaatttcacgctgcaggatgagagcgatctctttttgcatttcctgcgctacgcgctgcgggcgaccaaattctttcgccataataaattctcctgacaaaaaaggggctgttagcccctttttaaaattaatttcaggtggaagggctgttcacgttgacctgataagacgcgccagcgtcacatcaggcaatccatgccggatgcagcgtaaacgccttatcccgcatggaaccctaaaaaccttaagcaatggtacgttggatctcgatgatttcgaatacttcgatcacatcgccagtgcggacgtcgttgtagttcttaacgccgataccacattccataccgttacggacttcgttaacgtcatctttgaagcggcgcagggactccagctcgccttcgtggataaccacgttgtcacgcagaacgcggatcgggttgtgacgtttaaccacaccttcggtaaccatacagcctgcgatggcaccaaatttcgggcttttgaacacgtcacgaacttccgccagaccgataatctgctgtttcagttccggagacagcataccgctcatcgccgctttcacttcgtcaatcaggttatagatgacggagtagtaacgcagatccaggctttccgcttcaatcactttacgtgcagaggcatcagcacgtacgttaaagccaaccaggatggcgttggacgccgcagccagggtggcgtcggtttcggtgataccacctacgccagaaccgatgatcttcactttaacttcgtcagtagacagtttcagcaaggagtcggagatcgcttcgacagaaccctgtacgtctgccttcaggacgatattcacttcgtgaacttcgccttcggtcatgttggcgaacatgttctcgagtttagatttctgctgacgcgccagtttaacttcgcggaatttaccctgacgatagagtgcaacttcacgcgctttcttctcgtcacgtacaacggtaacttcatcacccgcagccggtacgccggacaggccgaggatttccaccggaatggacggacccgcttccagcacttcctgacccagttcgttacgcatcgcacgaacacgaccgtattcgaagccacacagaacgatatcgcccttgtgcagagtaccttcacgtaccagaacggtagcaaccggaccacgacctttatcgaggaaggattcgataaccgcaccgctcgccatacctttacgtaccgctttcagctccagaacttccgcctgcagcaggatagcgtccagcagttcatcgataccggtacccgctttcgcagatacgtgtacgaactggctttcaccgccccactcttccggcaggatgccgtactgggagagttcgttcttaacgcgatccggatcagcttctggtttatcgatcttgttcactgcaaccaccaccggtacctgcgccgctttcgcgtgctggattgcttcgatggtctgcggcatcacaccgtcgtcggcagcaacaaccaggactacgatgtccgttgcctgcgcaccacgagcacgcatactagtaaacgcggcgtgccccggggtgtccaggaaggtgatcatgccgttttcagtttcaacgtggtatgcaccaatgtgctgggtaatgccgcccgcttcgccagaggccactttcgtactacgaatgtagtccagcagagaggttttaccgtggtcaacgtgacccatgatggtcacaaccggcgcgcgcggttcagccgcagcacccgtgtcacggtcgctcattaccgcctcttccagctcgttttcacgacgcaggataactttatggcccatctcttcagcaaccagctgtgcggtttcctgatcgataacctggttgatggttgccattgcgcccagtttcatcatcgctttgatgacctgagagcctttaaccgccatcttgttcgccagttcgccaacggtgatagtttcgccgatcacaacgtcacggttaacggcctgagcaggcttctggaagccttgctgcaggctagaacctttacgttttccgcctttaccgccacgtactgctgcgcgtgcttcttcacgatcagctttactttcagcgtgtttgttgcctttcttcggacgcgctgctttcgcgttacgaccacggccacggccgccttcgacttcacgatcgctttcgtcttctgcctggcgagcatgttgagaagtagtgacgtgataatcgctggaatcttcagtcggttccgcgttatcagtccatttgttttcttccgccatacgacgtgcttcttcagcaacgcgacgtgcttcttcttcgagtttacgacgcgcttcttcttcagctttacgcttgagctctgcagcttcctgctcacggcgggctttttcagcctgggcgtttttagtcatatcgtcttgttgattgctcactttgtctttttccgcagcttcacgtttcgcttgttcagcagcttcacgcttagcttgttctgcggcctcacgttcagctttttgttgcgcctcgcgtttagcgctttcttctgcctcacgacgggcttgctcttccgcttcacgctgcgcttgctcttccgctgcaaggcgttcagcctcttgcggatcgcgtttcacaaaggtgcgtttcttgcggacttcgatttgtacgcttttgctttttccaccggtaccaggaatgttaagggtgctgcgtgttttacgttgcagcgtcaatttgtccgggccactatttttctgattcaggtggtcaatcaaagtctgtttctcttgtgcagacacagagtcgtcagcagacttccggatacctgcatcagcaaattgctgtaccaggcgttccacggaggtctgtcgctctgcggccagcgttttaatcgttacatctgtcatgctgttccttcctgctacagtttattacgcttcgtcaccgaaccagcaaatattacgggcagccataatcagtgctccggctttttcgtcggtcaacccttcgatatcagccagatcatcaatgccctgttcggcgagatcttccagcgtacaaacgccacgggcggccagtttgaatgccaaatcacgatctaccccttcaaggttcagcagatcgtcagccggtttgttatcaccgaggctttcttcctgggcctgtgcaatggtggccagtgcatttttagcacgctcgcgcagtgcttcaacggtcggctcatcaaggccttcgatttccaacagctctttcatcggcacataggccaattcttccagcgtgctgaagccttcttctaccagaacagtcgcgaagtcttcgtcgatgtcgagatatttggtgaaggtgtcgatcgctgcgtgcgcttccgcctgatgcttagcctgcaggtcgtcaacggtcatcacgttgagttcccaaccgctcagctggctagccagacgcacgttctgaccgttacggccaatcgcctgcgccaggttaccggcttcaacggcgatatccatggtgtgtttatcttcatccaccacgatagaagcaacgtctgccggtgccattgcgttaatcacgaactgcgccgggttatcatcccacaggacgatatcgatacgctcgccacccagttcagtagacaccgcctgaacacgcgcgccacgcatacctacgcaagcacctaccggatcgatacgtttatcgttggttttcaccgcgattttcgcacgagaacccggatcgcgagccgctgctttaatttcaatcacttcttcgccgatttctggcacttcaatacggaacagttcgatcagcatttccggcttggaacgagtgacgaacagttgcgcgccacgcgcttccgggcgaacggaatagagcacgccacgaacgcggtcgccagggcggaagttttcacgcggcagcatatcttcgcgcaggatcacggcttcagcgttgttgcccagatccagagagatgttgtcgcggtttacttttttcaccacgccggtgatgatttcaccttcgtgttcacggaactgatcaaccaccatcgcacgttcggcttcacgcactttctgcacgataacctgttttgccgtctgggtagtgatacggtcaaaggtaacagactcaatctgatcttcaacgtaatcgcccaggttcaggctttcatcttcataacgtgcggcttcaagggtgatttccttggtcggctgggtgacttcatcaacaactaaccagcgacggaaagtgtcaaaatcaccgcttttgcgatcgatctgtacgcggacgtcgatctcttgttcatattttttctttgttgctgtcgccagcgcgctttccaatgcttcgaaaatcttctcgcgaggtagcgccttttcattggatacggcttcaactacagccaaaatttctttgttcatcgcgggcttttcacctcatccagactattaaaagtggggaaccaggttcgccttctggatattactcagcgcgaacacttcatctttaccttcgacggtaactgtgatcatttcaccgtctaccgctttgataacgccctgccatttacgacggttttgtaccgccatacggagaaccagagtcacctcttctccgacaaaacgggcgtagtgttcagccgtgaacagtgggcgatcgagacccggactggagacttccaggttataagcaacggtgatgggatcttcaacatccagcacagcacttacctggtggctcacatcagcacaatcatcaacattgatgccatcttcactatcaatatagatgcgcagtgtggatgtgcgaccgcgaataaattcgatgccaaccagttcaaaacccagggcctcaactggcgcagtaatcatctctgttaatttttgctctaatgtggacaagcccacccccaagacataaaaaaagggcctaaagcccagttattctgtagtcagataacaaaaaaccccgataaatcggggctttatataactgaaccctataaccgcaactgcggtctggagcactttccagaaggattttttcaaatcccactacgaaggccgaagtcttcacagtatatttgaaaaaggactctaagggaaagtggttgcgggggccggatttgaaccgacgatcttcgggttatgagcccgacgagctaccaggctgctccaccccgcgcctgaaacgtggcaaattctactcgttttgggtaaaaaatgcaaatactgctgggatttggtgtaccgagacgggacgtaaaatctgcaggcattatagtgatccacgccacattttgtcaacgtttattgctaatcatgtgaatgaatatccagttcactttcatttgttgaatacttttgccttctcctgctctcccttaagcgcattattttacaaaaaacacactaaactcttcctgtctccgataaaagatgattaaatgaaaactcatttattttgcataaaaattcagtgagagcggaaatccaggctcatcatcagttaattaagcagggtgttattttatgacgacgattctcaagcatctcccggtaggtcaacgtattggtatcgctttttctggcggtctggacaccagtgccgcactgctgtggatgcgacaaaagggagcggttccttatgcatatactgcaaacctgggccagccagacgaagaggattatgatgcgatccctcgtcgtgccatggaatacggcgcggagaacgcacgtctgatcgactgccgcaaacaactggtggccgaaggtattgccgctattcagtgtggcgcatttcataacaccaccggcggcctgacctatttcaacacgacgccgctgggccgcgccgtgactggtaccatgctggttgctgcgatgaaagaagatggcgtgaatatctggggtgacggtagcacctacaaaggaaacgatatcgaacgtttctatcgttatggtctgctgaccaatgctgaactgcagatttacaaaccgtggcttgatactgactttattgatgaactgggcggccgtcatgagatgtctgaatttatgattgcctgcggtttcgactacaaaatgtctgtcgaaaaagcctactccacagactccaacatgcttggtgcaacgcatgaagcgaaggatctggaatacctcaactccagcgtcaaaatcgtcaacccgattatgggcgtgaaattctgggatgagagcgtgaagatcccggcagaagaagtcacagtacgctttgaacaaggtcatccggtggcgctgaacggtaaaacctttagcgacgacgtagaaatgatgctggaagctaaccgcatcggcggtcgtcacggcctgggcatgagcgaccagattgaaaaccgtatcatcgaagcgaaaagccgtggtatttacgaagctccggggatggcactgctgcacattgcgtatgaacgcctgttgaccggtattcacaacgaagacaccattgagcagtatcacgcgcatggtcgtcagttgggccgtctgctgtaccaggggcgttggtttgactcccaggcgctgatgctgcgtgactctctgcaacgctgggttgccagccagatcactggtgaagttaccctggagctgcgccgtgggaacgattatagtatcctgaataccgtcagtgagaacctgacctacaagccagagcgtctgacgatggaaaaaggcgacagcgtgttcagcccagatgatcgtattggtcaattgaccatgcgtaacctggatatcactgatacccgcgagaaacttttcggttatgccaaaactggcctgctttcctcctctgccgctagtggcgtgccgcaggtggagaatctggaaaacaaaggccagtaattcgacatcaaccctgcccttcaggggtggggttaccttgcttatcctctgtaaactcctttctgagcatcacataatcgaaaacatcatggtttgcatccacaacccgactgtctcctttatagtgtgcaatcacttcctcaagcgtttgcggctgttccggctttgttacccccatccacgcattaataaggtaattattgtaagctgtgctaaagatgttgttttccgttgtgcgatccacgccatccccaagaacggggctataccagataaacatcgggacatgatatgcctgctggctagcctccctgcctccatgaaaatagacgttcttcttcgtagggtcacgttccaggccgtggtcggcaaaatacatgacgctggcgcggcgatcttttaataattcaaaaacctgacctagcaaactatctgtgtaatgaatggagttgtcatagcaggcatcctgatcgtcctgcggttgaaacacggcgctggattgcggataggcgctacaagccggttcatggcttccatttaaatgaagaacaatcagtttcttttgctgcgtattttgctgtaatgcttggcttaaatgcggcaacaacaattcatcaaatcctctgacataaactgtttccatggcgcgcatggcgatactggtaactgctgtaccattctgccgaaaagcggattggctgcttagccagaaagtctgaaatcctgcttgattagccatattaataatgttgtcggggtaattatgaatgtcatgactcaaaacagaatcagcagttaaagaaaggggaacgctcagcgcagtgtaaggtgcgccgcttattgcttgattaaacagtttgatctgttttctttgtgcttcaacttgcggtgtcgtagagcgtgtatatccatacaaagacatattgtcgacacgtacagactcccccacaatcaacacgtaggtatcaatacctgtatccctgacacttaattgaaaatacggcaccgtgtttgcaatactgagtaatctttgatgctctttcgctgctaaagcaaaatagttgagattgaaaaacggcgtataggtagcaaatcggctcgctagtatatatggactgaacgcttttttattttttgcatctttataagcaaattgacaagcggaaaataaactgccgctaatgacaatcagcaataatattcctgtcactttttttgtcggcaaggaaacatcatattttattattactgccaaaaaaagaagggataaaaaagcaaaggcacatagataagggatatacatccccagcattttgacaacttcatccggatcactctggagcacactaatcgcaaatccatcattgaaagttgtaccaaaggtacaccaactatagaggctaatactcatgtctgccgcagtcagtaacacaaatggtgcggcaacaagcaggcgaagcggaagggaacttatacgttttacaaccaggatggtcagaacgaagaacagcaagcgctgaaccatatgcgctccggaagaagcgactaagttcgtaataccaaaaacaataacacaaagatacaacaaccaatgagatttaaaagttctagcaaatttgttgaatactgtcatccagaaatccaagttcacaaccaatataaacaattatcaacaatgtttaattttatatcagacatgtttttcaactctgatccatatcagaacgaaacactgttagttttttctttttaaatgatgcggccattgcgttctcagtaattaaataacattatcaatgcgtctctaaacattacgcagaacgtagccatcagtcgttatactgacaggagcaggatggtttatcgagaagtaaacatatccgtattcgtaccggaactggagttgacacaataaagtgccaattatgtcagtagaagggaaaaatttataactaaggcgtaccggcaccatcgtttcaaggtaccagctacgagtaaagcaactggacgagatacagatacctgacaaccattcctcagaccaggaccaaaacgaaaaaagacgcttttcagcgtctcttttctggaatttggtaccgaggacgggacttgaacccgtaagccctattgggcactaccacctcaaggtagcgtgtctaccaattccaccacctcggcacggatactactttttagttcgggatatcgctggtcggcttagccggagcagctggctgagtttgttcggttttcgccggtgcactcagattttcccattcgctacctttattggttttgttgctattgatgttacccagcaccagactgatgatgaagaataacgttgccagcagcgccgtcatgcgggtcatgaagttaccagaaccactactaccaaacagcgtagcggaagcgcctgctccgaaggaggctcccatatcagcgcctttaccttgctgcagcatgatcagaccaacaaggccaattgccacaataaggaaaactactaaaagagcttcatacataatcaacctgttccttgcggagttgccgcgtaccaatgcttcaaccaataaagcgggagtttttaatcttccccactgaagcgggtgtgaatactaaccaaagcgaatgaccttcgcaagggcaattttatcgcattgtatcaactgcggaaaaaaacagcaaaaccgatgtgttcgctgagaaaaaaggcgacaatcgccgcctttttagccagttatctaacgctttaaacggcttttactgcatcggcgatgcggtgtgcaaattcagtcacctgcgcttcgtcttcgccttccaccatcacgcgaattaacggttcggtgccggatttacgcagcaacacgcgtccacggttgcccagcgcagcttcaacctctgcggtcacggctttaacactctcatgctcaagtggatcgccgctacctgcggtgtaacgtacgttaaccagaatctgcgggaacattttcatgccgctgcaaaggtcgtgcaggctcatatggttacgtgccatcgccgccagcacctgcaagccagcaacgatgccgtcaccggtagtagttttatccagcaggatcacatgaccggaattctctgcaccgatacgccagcctttctcctgcattttttccagtacgtagcggtcacccactttcgcgcgcgcaaatggaattcctaactgtttcagcgccagttcaagccccatgttgctcatcaatgtacccacagcgccaccacgcagctggccctgacgaagaccttcacgcgcgatgatatacatgatctgatcgccatcgactttattgccttcatggtcaaccataatcacgcgatcgccatcgccgtcgaaggcaataccgagatccgctttttcagccagcacacgagcctggagcgcgcgaacgtcggtagcccccacttcggcattgatgtttacaccgtttggctcacaaccgatagcgataacgttcgcccccagttcgcgcagcacgttcggcgcgatgtgataagtcgcaccgtttgcacaatccaccacaatcttcagttcactgaggctaagttcgttcgggaacgtggctttgcaaaactcgatatagcgacccgcggcatcaacgatacggctggctttacccagttctgcgctatcaacgcagctgatctccttttccatttccgcttcgatggcctcttctaccgcatccggcagtttggtgccgtcgatagagaagaatttaatgccattatcgtagaacgggttatggcttgcagatatcacaattccggcctctgcgcggaaggtacgcgtcagataagccacggccggtgttggcatcgggccagtgaagagtgcggaaaggcccgctgccgccagacccgcttccagtgcactctccagcatatagccagaaatacgcgtgtctttaccaataataatcttacgggagccgtggcgcgccagcactttacccgcggcccaacccagcttaagcacaaaatcaggtgtgatcggcgcatcccctacacgaccacgaatcccatcggtaccgaaatatttacgattactcatagcgtttgttttcctttgcagacagagtggcttccaccacccgcatcgcttctacggtttctttgacgtcatgaacacgaatgatgtgcgcgccttgcattgcggcaatgaccgcacaggccagactaccgctcaggcgctcggacggccccacgttcagcagctgcccaatcatgctttttcgactcatacccaccaacagcggcaggttgaaatggtgaaattcagccaggcgcgccagtaaactatagttatgggagagatttttaccgaaaccgaatccggggtcgagcaacaatttctcttttgcgatacccgcctgctcgcaacgtgctatttgctcaataaagtagcgattcacttctgcaaagacatcgtcatacttcggagcttcctgcatggtttttggatttccctgcatatgcatcagacaaaccggtaaaccggtttctgcagccgcctccagagcgccaggttcggaaagggagcggatatcattaataatgtgagcgccaactttcgcactctcacggatgacttctggtttggatgtatcgacactgatccagacttcgaagcgttgagcaattgcctcaaccacaggaataacacgttgcaactcttcttcaacgctaacttccgccgcccctgggcgcgtggactcgccaccaacgtcaatgatcgtcgcgccagcgttgatcatcagattcgcatgtttcaccgcatctatcaggctgttatgcgtgccaccatcgctaaaggaatcaggcgtgacgttgaggatccccattacgtgaggatggctaaggtccagactagtaccctgggcaaagagtttcatgatgttatccctggtatgaattgataagaaaaaaccccggagcacgccccggggttttcggtacaaatacagtcatctgatgcgggaacttacttgtcgcctaactgctcactcatggtgttacccgggttcggcgtacgcggttcatcaaccggacgaggagcctttggactaccattgtcgccagaattgttagaagcgcctggttcttcccagcccgctggcggacgtacatcgcgacgtgccatcaggtcatcaatctgcggtgcgtcgatagtctcatatttcatgagagcatctttcatcgcatgcagaatatccatattgtcggtcagaagctgacgcgcacgattatagttacgctcaatcagtgctttcacttcctggtcgatgatacgtgcagtttcatcggacatatgtttcgctttcgctacgctacggccgaggaacacttcaccttcttcttccgcgtacagcagtggacccaatttctcagagaagccccactgagtcaccatgttacgtgccaggttggtcgcaactttaatatcgttggacgcaccggtagatacatgttccggcccgtagatgatctcttctgccagacgaccaccgtacagcgtagaaatctggctttccagtttctgacggctggcgctgattgcgtcgccctcaggcaagaagaaagtcacacccagcgcacgaccgcgtgggataatcgtcactttgtgcaccggatcgtgttccggcaccaggcgaccgataatcgcatgacccgcttcgtggtaagccgtgctttctttctgcgcttccgtcatcaccatggagcgacgttccgcacccatcatgattttgtctttcgctttctcgaactcaaccatgctcacaacgcgtttgttgccacgagcagcgaacagtgccgcttcgttcaccaggttcgccaggtcagcaccggagaaaccaggagtaccacgggcaatgattgccgcgtcgatatcgggtgccaatggtacgcgacgcatgtgaactttcaggatctgctcacgaccgcgaacatctggcaagccgaccacaacctgacggtcgaaacggccaggacgcagcagggccgggtcgagaacgtccggacggttagtcgcggcgataacgatgataccttcgttaccttcgaagccatccatctcaaccagcatctggttcagagtctgttcacgttcatcgtgaccaccgcccagaccagcgccacgctggcggcctacggcgtcgatttcatcgataaagatgatgcacggtgccgctttcttcgcctgttcgaacatgtcacgaacacgggatgcacccacaccgacgaacatttctacgaagtcagaaccggagatagtaaagaacggaactttcgcttcgcctgcaatcgctttcgccagcagcgttttaccggtacccggaggaccgaccatcaagacgcctttcgggatcttaccgccgagtttctggaagcggctcggctcgcgcagatactcaaccagttcagcaacttcttcttttgcttcgtcgcagcccgcaacgtcagcaaaggtcgttttgatctgatcttccgtcagcatgcgcgctttgctcttaccaaagctcatggcacctttgccaccgccgccctgcatttgacgcatgaagaagatccagacaccaatcagcaacagcatcgggaaccaggagatgaagatagaagccagcaggcttggttcttcaggcggttcaccgacaaccttgacgttcttggtcaacaggttatccagtaatttcggatcctgaaccggaatgtaagtggtataacggttactatctttcttggtaacgttgatttcacgtccgttgatacgcgcttcacgaacctggtcgttattgacctcttgtaggaaggtagagtaatccaccttacggccattagactcgctgggcccaaagctctggaatacactcatcagcacaacggcaatgaccagccagagtattaggtttttcgccatgtcactcaagggattaacctcttattacaactgtgttaaaaacagcgtcaggatactctatatccagcatctttcaaactttcgtctgaaatctcccggttagggtttacgcccggtcgctacaatatacacttcccggctacgtgcacgagaagagtccagcttacgaactttgaccttcgtaaacagggagcgaatttcccttagatactcatcgaaaccttcgccctggaacaccttcactacaaaactgccacctggcgctaatacatcacgacacatttctagcgccagttccaccagatacatggcacgggggatatccaccgccggtgttccgctcatgtttggtgccatatcggacatgacaacctggactttgctgtcgccaacgcgctccagcagtgctttcatcaccagttcatcacgaaaatcgccctgaagaaagtccacaccaacgataggatccataggtaaaagatcgcaagcgatgatgcggcctttgccgccaatttgggtgaccacatattgactccaaccacccggagcagcaccaaggtcgacaaccgtcattcccggtttaaagagtttgtcactttgctgtatttcatcaagtttaaaccaggcacgggaacgtaacccctttttctgtgcctgttgaacatatttatcgctaaagtgttcctgaagccagcggctggagctggcagaacgcttcttacctgtcatttaactttcccatggggataactcatcgtaaccaattgcgtaaatttttacgcgcctatttggtgatatatgggagatggcggtagaatgacccgttttcaatcccaacgtaagcaaaaaatacgatgaatctgagtactaaacaaaaacagcacctgaaaggtctggcacatccgctcaagccagttgttctgcttggcagtaatggtttgaccgaaggggtgctggccgagattgaacaagcgttagagcaccatgaactcatcaaggtgaaaatcgccaccgaagatcgcgaaactaaaaccttgatcgtggaagctatcgtgcgcgaaaccggcgcctgtaatgtacaggtcatcggtaaaacgctggtgctttatcgcccaactaaagaacgtaaaatcagcctgccacgctaagattatcctaaagttacacacatttgctgtgtaaaacgaggggttttccgcaggcaggagagcaaaatgccacgctctgttcgttgataaaaggccgcatagcggcctttttcctttctttacaatacatcaacatcttgagtattgggtaattcttacaggtattccaccttaattacttcaaattctacttcgccgcccggcgttttgatgaccacaacatcatcttcttctttgccgatcaggccacgagcaatagggctgtttacagaaatcaggttttgtttaaagtcagcttcgtcatcgccaacgatgcgataagtctgttcttcgtcagaatccagattcagcaccgttacggtagcaccaaaaataacgcgcccattgttgggcattttggtgacatcaatcacctgcgcgttgctcagcttggcttcgatgtctttaatacggccttcgcagaaaccctgctgttcacgagctgcgtggtattcggcgttttctttcaggtcgccatgctcacgcgcttccgcgatagcagcaatgatttcaggacggcgcacagatttcagaaaatccagctcttcgcgtaatttttcagcgccgcgtaaggtcatcggaatagcttgcatttgttatacctcttgaatattcctgatagggcaagtcttcacccaccccggctgttcggcctgcccggcataactccttaccgggaccagaagcaaaaaaataccgacccgggtacaagtcccaggtcagctacaattcacattttgatagtcattttaccctgaagttcccgaagggtcatcgtttactttatagggcgttgcgccgtagtatgacggctcgattccaggttgttagcgcgagattatgcgattttccagatttatcatcggattgaccagctgtatagcgttcagtgttcaggccgcaaatgttgatgagtacattactcaactccccgctggtgccaaccttgccctgatggtgcaaaaagtcggcgcgagcgcccccgctattgattaccacagtcagcagatggcgctgcctgccagtacccagaaagtgattactgcgctggcggcgttgattcaactcggccccgattttcgttttaccacgacgcttgaaaccaaaggcaatgtggaaaacggcgtacttaagggtgacttagtggcgcgatttggtgccgatccgacgttaaaacgtcaggatattcgcaatatggtcgcgactttgaaaaaatctggcgtcaaccaaatcgatggcaatgtgttgatagatacctccattttcgccagccacgataaagcccccggctggccatggaatgacatgacacaatgctttagcgctccgcctgccgccgccatagttgaccgcaactgtttctccgtcagcctctacagtgccccaaagcctggtgatatggcttttatacgcgtggcatcttattaccccgttacgatgttcagccaggtacgcaccctcccccgtggttctgccgaagcgcaatactgcgaactggatgtggtgccaggcgacctgaaccgctttacgctgacgggatgcctgccacaacgttctgagccgctcccgttggcttttgccgtgcaggatggagccagctatgccggtgcaattctgaaagatgagttaaaacaggcgggtatcacctggagcggaacactgctgcgccagactcaggttaacgaacctggaacggtagttgccagtaaacagagcgccccgctgcacgatctgcttaagattatgctgaaaaagagcgacaacatgatcgccgatacggttttccgcatgataggccatgcgcgcttcaatgtgcctggaacatggcgggccgggagcgacgccgtgcgtcagatcctgcgccagcaagccggtgtcgatattggaaacaccattattgccgatggtagtgggcttagccggcataacctgattgcccccgccaccatgatgcaggtgctgcaatacattgcccaacacgacaatgaacttaactttatctccatgctgccgctggcgggctatgacggctctttgcagtaccgtgcaggtctgcatcaggcgggcgtggatggaaaagtcagtgcgaaaaccggtagcttgcagggggtatataacctggcgggattcattaccacagcgagcgggcaacgaatggcgtttgtgcaatatctttctggctatgcagtagaacctgcggatcagcgtaatcgccgtattccgttagtgcgttttgaaagccgtttgtataaagatatttatcagaacaattaatcaaaaagaaaccccggcacatggccggggcttcagattattgacaaagtgcgctttgtttatgccggatgcggcgtaaacgccttatccggcctacaaaatcgtgcaaattcaacatattgcaattctcttgtaggcctgataagcgtagcgcatcaggctgatttggcgtttatcatcagtgattaacgcttgtaaatgaactcaacgccttcttcgtcgtcttcgtcccagtcgtcatcccagtcttcatcatcctcttcagcaatctcttcaagctgctggcgatgataatcatcccacatgaattcgactttctctggctgtttcgcttcttcagcctgcacgaccgggttttcaatgataaaggtcatcacatcccagcagagatctttcacgcccagtccactcgccgcagagatcagataatatttatcttcccagcccagcgcctcagcgatcgctttcgctttctcttcggcttctaccttatccagcagatcgatcttgttgaacactaaccaacgcggtttcgtcgccagatcctggctgtatttttccagctcgctgataataatacgcgcgttttcaaccggatcggtgccgtcaatcggatcgatatcgatgaggtgcaacaggacgcggcaacgttccaggtgcttcaggaagcgaatgcccagacctgcgccttccgcagcgccttcaatcagtcctggaatatcggcaacaacgaagctcttttcgttgtccattcgtaccacacccagacttggcaccagagtggtaaacggataatccgccactttcggtttagccgcgcttaccgcacgaataaaggtgcttttacccgcgtttggcatccccaacataccgacgtcagccagcagcatcagctccagcagcagctcgcgcttatcgcccggcgtgccgttggttttctgccgcggtgtacggttaacggagcttttgaaacgggtattgcccagaccgtgccagccgcccttagcaaccagcagacgctgaccgtgtttggtcatatcgcccatggtttcaccagtaccctggtcgattacacgcgtacctaccggcactttaatcgtcacgtctttaccgcgcttaccggtacagtcgcggcttgcgccattctgaccgcgctctgcacggaaagatttttcaaaacgataatcgataagcgtgttcaggttctcgtcggcttccatccatacgtcaccaccatcaccgccgtcgccgccatccgggccgcctttcggaatatacttttcgcggcggaagctcacgcaaccattaccgccatcacctgcaacgaccagaatgcttgcttcatcaacaaacttcattttattctccgtaaatcattcgcctgcgcggggttggcttaccaccgttgtatgcttacgtaatccgccccaaatacgatgaccaatggcggaatacatcgcgcccgcaaccacgacaaacgcaccgagataacctaaaaggtttaacatcggtctggcgaagaaatcgggccaggccagacttaaaagatcactaaaaaacagcgtaaacagtggggtgagcgtgatgatcgcgctcacctgcgctgcctgccagcgagccatcgcttccgccagggcgccatatcctaccaaggtattcagtccgcaaaaaattaaacatgcgagctgccagtggctaagctgcgctatcactccaggctttgccagagggaagagcgcaattgtacataaagtgtacagtaaaaacaggatctgcggactggccagccgacgcaataaaaccttttgcgccacgccataactcacccaaaccgtcgccgcaccgaccccaaagataactccccaggtgtaatcggtgagctttgtaaatatctcgaccagactggtgttaaaaaacatcaccaggccgctcaggagcatcaatgcccctacaacctgagtgctgcgcattttctctttgaggataaatacgctggcaaccatcatgccaactgggctgagttgcccaatcacctggctagcggtcggactcaggtattgcaaggaactgctgaacaggatgaagttcccaaacagcccggcggtcgccactgccaacaaaatcaaccagcgtggcttacgaaacacgcgtaatggcggcaacctcttcttcaccgcaagaatggcacccaggccaatactcgccatcaagaaacggtaaaacacgattgtcggaggttccatcacctccagcacctgcttcattgcgattggcaacgccccccagcaaattgctgtggtgagcgccaaaagaatgccaatgcctgcctgctgcttcataccgtattccctgcaaagcgcatttgcggattaacgtcgcaccatgcgcatttttaccggttatcgaatgtaaaaagccccgcaacgtgttgcggggctttcatccgttaccgggacgcgaaaaacttattcagcttcgatgctgataaatttacggtttttcgggcctttaacttcgaatttcactttaccgtctgctttagcaaacagagtgtggtcacgaccgcaacctacgttagcgccagcgtggaatttggtaccacgttgacgaacgatgatgctacccgccagaacggattcgccaccgaaacgcttaacgcccaggcgtttagcttcactatcgcgaccgttacgtgtggagccgccagcctttttatgtgccatttgaaatctctcctcaggtcttaggcgctgatgccagtaattttcacatcagtgaaccactgacgatggccctgctgcttacgatagtgtttacgacgacgaaacttaacgattttaactttctcgccacgaccgtgagcaacaacttcagctttgattacgccgccatcaacgaaaggaacgccgattttgacttcttcaccgtttgcgatcatcagcacttcagcgaactcaacagtttcgccagttgcgatgtccagcttttccaggcgaacggtctgaccttcgcttactcggtgttgtttaccaccactttggaaaaccgcgtacatataaaactccgcttccgcgcacaccttttcaatgattcagagtgcgctataaatattcacaatagggcgcgaatattacgcaaaacgcacgcctttgacaagtgctacagtcaatacacgaagaaaaaaaacacaacttgtacggtaacgtttatctgtgccattttttcagtacaatcaccctatattcctaaccataaaccctaagttgcctttgttcacagtaaggtaatcggggcgaaaagcccggcttttgcgatgaatttagaaaaaatcaatgagttaaccgcgcaagatatggcgggtgttaatgcggcaatccttgagcagcttaattccgacgtccaactgatcaatcagttaggctattacatcgtcagcggcggcggtaaacgtattcgtccgatgattgctgtactggctgcacgagctgttggctatgagggaaatgcgcatgtcaccattgctgccctgatcgagtttatccacacggcgactctgctacacgacgacgttgtggatgaaagtgatatgcgcaggggtaaagctaccgccaacgccgcatttggcaatgccgccagcgtgctggtaggcgattttatttatacccgcgctttccagatgatgaccagcctcggtagcctcaaagtgctggaagtcatgagtgaagccgtaaacgtcatcgcagaaggtgaagttctgcaactgatgaacgttaacgatccggacatcactgaagaaaactacatgcgcgttatctatagcaaaaccgcgcgtctgtttgaggctgccgcgcagtgttccgggattctggctggctgtacgccggaggaggagaaaggcctgcaggattatgggcgctatctcggcactgctttccagttgatcgacgatttactcgattacaatgccgatggcgaacagttaggtaaaaatgtcggcgacgatctgaacgaaggtaaaccgacgctgccgctgctgcatgcgatgcatcatggcacaccagaacaggcacagatgatccgtaccgccatcgaacagggtaacggtcgccatcttctggaaccggttctggaagcaatgaacgcttgtggatctcttgaatggacgcgtcagcgtgccgaggaagaagcagacaaagccatcgcagcgttacaggtgctcccggacaccccttggcgagaagcactcatcggcctcgcgcacatcgctgttcaacgcgatcgttaatcccctcccctcatcccgcgcagcgcgcgggatggttccagtaagttccataaaaacacttattcagctctataacacctgaaaaatagggatgtgcatctttatatattctgaatattcacactctttacaggaactttttagagcaataggccatcaggagtatagtgatgctcgacagaagaagtgttctgaatgaaagcgactaacttaaggagtgaggaaaaatggaaagtaatttcattgactggcatcccgctgacatcattgcgggtttgcgcaagaagggaacgagtatggcggcggaatctcgcagaaatggtttgagttccagtacgctggcgaatgcattaagccgcccatggccgaaaggagagatgattattgcgaaagccctgggaactgacccctgggttatctggccaagtcgctaccatgatccgcagacccatgagtttatcgacagaacgcagttgatgcgtagctacactaaaccgaaaaaatgagtggtctggcggtagccccgcgaacggggctgccagctctcagacgattattcgcctttcacacgctcaatatttgcacctaaagcgcgcagtttgtcttcaatgcgttcgtagccacgatcgatgtgataaatacgatcaaccaccgtcgtcccttccgcaatacagccagccagcaccaggcttgcacttgcacgcagatcggttgccataacctgtgcgccagaaagtttttcaacaccgtgacaaataacggtattgctttcgatttcggcgtgcgcgcccatacggctcagctctggcacatgcataaagcggttttcaaagaccgtttcggtgataaacccggtcccttctgccaccaggttcaacagcgtgaactgggcctgcatatcggtcgggaatgccggatgcggcgcggtacgtacgttaacagccttcggacgtttgccatgcatatccaggctaatccagtcttcgccgacttcgatgtccgctccagcgtcacgcagtttcgccagcacggcgtcgagagtatctggctgcgcgttacggcagataattttgccgcgagaaatcgccgccgccaccaggaaagtaccggtttcgatacgatccggcagaacgcgatagacaccgccgcctaaacgttccacaccttcgatgacgatacgatcggtgccctgaccgctaattttcgcacccagcgtaatcaggaagttcgcggtatcgacgatttccggttcacgcgctgcgttttcaataatcgtggtgccttccgccagggttgcagcacacatgatggtcaccgttgcgccaacgctgactttatccatcacgatatgtgcacctttcaaacgaccatcgacggaagctttaacgtaaccttcttccagtttgatggtcgcgcctaattgttcgaggccagaaatgtgtagatcaaccggacgcgcaccgatcgtacaaccgccaggtagactaacttgcccctgaccaaagcgcgctaccagcggccccagcgcccagatagaagcacgcatggttttaaccagatcgtaaggtgcgcagaatacattaacgtcgcgggcatcaatatgcacagaaccattacgttctactttcgcacccagctggcttagcagcttcatacttgtatcgacgtctttcagtttcgggacgttctggatctctaccggttcttccgccagtagtgcggcaaaaaggataggcagagcagcatttttagcgccggaaattgtgacttcgccctggagcttcgttggcccctgaacacgaaatttatccatttagtttgttctcagttaacaattcatatccgctaccggcgaatcgcccatagctcaaaagccgttcagtttgcgatcgcgcgcccactccgcaggggtatacgctttgatgctcacagcatgaatgcggttatccgcaatatattccatcagcggaccatagaccgtctgctgttttttaacccgactcatgccgtcaaacaactcacccacggcaataacctgaaagtggctgccatcgccggaaacgtggacttcctggagggagagagcgttcatcaacacgctctgaatttcattattttccatgggatcttcaatcatcagttaataaaccagcgaaacatcttagagcaaagttgcgctggcataaataagcaaaaagcctcgctgataaatcagacaaggctcgacttgcaggcaggtttgccggacaggcggttaacgccatatccggcctgaaaaaatttaacgaggcagaacatcagcaggcaaattatacaatttcgccagggtatacactttgtcgtttaccccctgaagcgtcacattgttgccctgctttttcgccagatcgataagatggagcagcagtgccagtccccccgtatccacgcgggagacacggctaagatcgatgcaggtaatccccttcaccgcttcctcacgcatttcccaaagcggtagcaaaacgtcctgatccagctctccggataacgccagcgtgtcacccgtctgcatccagctcagactctcgctcattattttttctcttccagagtgattttctgttgagaaatgcttttcagttgcgcagtcaggccgtcgatacctttggtacgcagcagcgttccccactcgttttgtttggtggtgatcatactgacgccttcagcaatcatgtcgtaagcctgccaattgcccgtctgggagtttttacgccactggaagtccagacgcaccggcggacggccattcgggtcaataatggtaacgcgaataggcacaatggttttatcgcccagcggctgttctggcgcaatctgataggtttgaccgtgatacatcgccagcgcctgaccgtaagcctgcttcaggtactcacggaaagcggcaaagtaggcttcacgttgagcaggggtcgcactcttgtaatactggcccagcaccagcgcaccggcgtatttcacctgtacgtatggcagcagttcctgatcaacaatggtacgcagataatccgggttggcccgaatttgcggttgctcattcttcaggcgatcgaacgttttctgcgccgcctcgtccatcagcttatacggattggtctggtctgccgcggttgccgcactcagaggtgcaatcaccagcaaagcgaccatcattaaacgtttaaacatgcgtcggttctcctgaaattatttcgttgtacccacaggttcagtggtttcattattacctggcgcagcagctggcgcatcgccactattcttattgtcatcgcctttactaccgtaaaggaactgaccaatgagatcttccagcaccatcgcagacttagtgtcctgaattgtatcgccatccttcaggatagcagtccccagttccgggtcttcaaaaccgacgtttaatgccagatattgttcccccagcaggccggaagtacgaatgctcaggctactggtatctggaatgtggttataacgttgttcaatttccagcgttacgcgcggcagataggttttcgggtccagcgtaatatccgccacccgacccacaacaacgccaccaatactgaccggagagcgcgctttcaggccgccaatgttatcgaacgtcgcataaagcgtgtaggtcggttcagtacgtatggacgtcacgttcgccgccttcaggcaaacaaacagcgccgccagcagtgctgctaataaaaagatacccacccaaatttcattttttttcgtttgcatgaactcaattcccaaacatcaatgcggtcagcacaaaatccagccccagaacagccagagagctgtggacaacggtgcgagtggttgcccggctaatcccggcagacgtcgggatggcgtcgtagccgttaaacaagctaatccacgtcaccgtgatggcgaacaccacgctcttaatcagacagttgaccagatccatacgccagtcgacggcattttgcattgcgctccagaagaacccgctatcaatgcctttccaactgacgccgaccagagatccgccccagatccccacggcgacgaaaataaccgtcaacagtggtaaactaataaccccagcccagaaacggggagaaataacccgacgcagcggatccaccgccatcatctccatactggagagttgctctgtagcgcgcatcaggccgatttctgcggttagcgcgctaccagcacgcccggcaaacaacaacgcggcaaccaccggccccagttcacgcagtaggcttaacgccaccagcatacccagactggtttccgcactataagtggtcagaaccagataaccttgcagccccaacaccattccgatgaacacgccagaaaccacaataatcagcatgctcaggacgccgacattatagagctggcgcaccagcagcggcgcatgtttgcgaaattccggtttgccgaccagcgcattgaataacattaacccggcccgcccgaacgttctcagggttttaatccctttatgtccgaggctcgccagcgcatttaacagcatgagtggcttaactccctggtaaaagatcagcgtgataatcgccggcaggatagcggaacggaacaggcccgtcagctatcccgtccagaaactgacgtacgcgcggatcaggattcgcctgcaacgcctgggcactgccatgagcgacaatttttttgtccgccaggatccaggcgtgatccgcaatacttaacacttccggcacatcgtgagaaaccaccacacaagtcacgcccagcgcgctgttcagctcagaaatcagcttcaccagtacgcccatggtgatgggatcttgcccaacaaaaggttcatcaaacatgatgagatccggctccagcgcaatcgcacgcgccagcgctgcacgccgcgccatcccaccggaaagttcagaaggcattagtttagccgctccacgcagccccacggcctccagcttcatcatcaccgtactatgcaacaatggcgcgggaagttgggtatgttcgcgcagtggataggcgacgttgtcaaatacgttcatatcagtgaacaacgccccggactgaaataacatgctcatccgtttgcgcactgtatacaggcggctacgagacatcgccggaatattctcaccatcgaaaaggatctcaccatgatctggtgcgatttgcccgccaatcagacggagtagcgtcgttttaccgatgccgcttggccccatgatcgccgtgatcttccctcgcggcacggtcagggaaatattatcgaagatgcagcgattgccacgcgtaaaactgacatcgcgcatatcgactaaattcgccacagactgctccataattcacccttcgtcttgcgttgattttctaagcatggcgctcaatttaaccttgaacccaacatatttacagaatattacccgccgtggttagcgaaagctggcatttgttttactttttagccgcataaagtcaaaattaagcatccgttacggctttctgaaaatcttcagcggaccggcgagtatacctgaagaaaggacgttagatgcttttagctacggcactgttaattgttggtttacttttggtcgtttacagtgccgaccgcctggtttttgccgcgtctattctttgccgaacctttggcatcccgccgctgatcatcggcatgacggtggtcagtattggtacaagcttaccagaagtcatcgtcagccttgccgcgtctctgcacgaacaacgcgatttagccgttggtacagccctcggcagtaacattatcaatatattgctgatcctcggtctggctgcgctggttcgtccttttaccgtccattctgatgttctacgccgtgaattacccttaatgttgttggtcagcgtggtggccggttccgtactctatgacggacaacttagtcgcagcgatggtatctttctcctctttctggctgtgctatggctgctgttcattgttaaacttgcacgtcaggctgaacgtcaggggactgacagcctgaccagagagcagcttgcagagctgccgcgtgacggcggattgcccgtcgcgtttttatggctcggcattgcgcttatcatcatgccagtggccacgcggatggtggttgataacgccacggtgctggcgaattactttgccatcagcgagttgacgatgggtctgacggcaattgctatcggaaccagcctgccggaactggcaaccgcaatagcgggggttcgcaaaggtgaaaacgacattgctgtcggaaatatcattggcgcaaacatttttaatattgtcatcgtgttgggtttacccgcgctgataacgccaggagagattgatccactggcgtacagtcgtgactacagcgtgatgttgctggtgagcattatttttgcgttgctgtgctggcggcgctccccgcaaccgggccgtggtgtaggggtattattaactggcggatttatcgtatggctggcgatgttgtactggttaagcccaatactcgttgaataactggaaacgcattatgagccacgtagagttacaaccgggttttgactttcagcaagcaggtaaagaagtcctggcgattgaacgtgaatgcctggcggagcttgatcaatacatcaatcagaatttcacgcttgcctgtgaaaagatgttctggtgtaaagggaaagttgtcgtcatggggatgggaaaaagcgggcatattgggcgaaaaatggcggcaacgtttgccagcaccggtacacctagttttttcgtccatcctggtgaagccgcgcatggtgatttaggcatggttaccccacaggatgtggtgattgctatctctaactctggtgaatccagcgaaatcacggccttaattccagtgcttaagcgtcttcacgtaccgttaatctgcatcaccggtcgcccggagagcagcatggcgcgcgccgcagatgtgcatctgtgtgttaaagtagcgaaagaagcctgtccgttagggctggcaccgaccagcagcaccaccgccacgctggttatgggcgatgccctcgctgtcgcgctgttaaaagcacgcggctttactgctgaagattttgcgctcagtcacccaggcggcgcactgggtcgtaaacttctgctgcgcgtaaacgatattatgcatacgggcgatgagatcccgcatgttaagaaaacggccagtctgcgtgacgcgttgctggaagttacccgcaaaaatcttggtatgactgtcatttgcgatgacaatatgatgattgaaggcatctttaccgacggtgatttacgccgtgtcttcgatatgggcgtggatgttcgtcagttaagtattgccgatgtgatgacgccggggggaatacgtgtgcgccctggcattctggccgttgaggcactgaacttaatgcagtcccgccatatcacctccgtgatggttgccgatggcgaccatttactcggtgtgttacatatgcatgatttactgcgtgcaggcgtagtgtaaagattcaaggataaacaacaatgagcaaagcaggtgcgagccttgcgacctgttacggccctgtcagcgccgacgttatagcaaaagcagagaacattcgtctgctgatcctcgatgtcgatggcgtactgagtgatggcctgatttatatgggcaataatggcgaagagctgaaagcgttcaatgttcgtgacggttatggcattcgttgtgcgctcacctctgatattgaagtcgctatcattaccgggcgaaaggctaaactggtagaagatcgttgtgccacattggggatcactcacttgtatcaggggcagagtaacaaactgatcgcctttagcgatctgctggaaaaactggcgattgccccggaaaatgtggcttatgtcggcgatgatctcatcgactggccggtaatggaaaaagtgggtttaagcgtcgccgtggccgatgcgcatccactgttgatcccgcgcgccgattacgtgacgcgcattgctggcggtcgtggcgcagtgcgcgaagtttgcgacttattactcctggcgcagggcaaactggatgaagccaaagggcaaagcatatgagtaaagccagacgttgggttatcattgtgctaagtctggcggttctggtgatgatcggcattaatatggccgaaaaagacgataccgcccaggtggtcgtcaacaacaatgatcccacctataaaagcgagcatacggacacgctcgtctataacccagaaggggcactaagctatcgattgattgctcaacacgttgaatattattccgatcaggccgttagctggtttacgcagccggtacttaccacgtttgataaggataaaatcccgacatggtccgtaaaagcagataaagccaagctgaccaatgaccggatgctctatttatatggacacgttgaagtcaacgcacttgtgccagactctcaacttcgcagaatcacgacggataacgcgcagatcaatctggtgacgcaggatgttacctctgaagacctcgtcacgttatacggaacaacatttaactccagcggtctgaaaatgcgcggcaacttacgcagcaagaacgccgagctgattgaaaaggttagaacatcctatgaaattcaaaacaaacaaactcagccttaatcttgtgcttgccagcagtcttctggccgccagcattccggcatttgccgtaaccggagacactgatcagccgatccacattgaaagcgaccagcaatctcttgatatgcaaggcaacgtggttacctttaccggtaatgtcatcgtcacccagggcaccatcaaaattaatgccgacaaagtggtcgttacccgtccgggcggcgaacaaggtaaagaagtgattgacggctacggtaaaccggcaacgttctaccagatgcaggacaacggtaaacccgttgaaggtcacgcttcccagatgcactacgaactggcaaaagattttgtcgttctgacgggtaatgcttatctgcagcaggtcgatagcaacattaagggcgataagatcacttacctggtgaaagagcagaaaatgcaggctttcagcgacaaaggcaagcgcgtaacaaccgttctggtgccgagccagctgcaggacaaaaacaacaaaggccagaccccggcacagaagaagggtaattaattcgttatggcaacattaactgcaaagaaccttgcaaaagcctataaaggccgtcgcgtggtagaagacgtcagcctgaccgtcaactccggggaaattgtcggtctgctggggccaaacggtgccggtaagaccaccactttctacatggttgtaggcattgtgccgcgcgatgcgggcaacatcattattgatgatgacgatatcagtctgctgcctctgcatgcacgcgcgcgccgcggtatcggctatctgccacaggaagcctccattttccgtcgcctcagcgtttacgataacctgatggcggtactgcaaattcgtgacgacttgtctgctgaacaacgtgaagaccgcgcgaacgagctgatggaagagtttcacattgagcacctgcgtgacagcatggggcagagtctctccgggggtgaacgtcgccgtgtagaaattgcccgcgcactggctgcgaatccgaaatttattctgctcgacgaaccgtttgccggggttgacccgatcagcgttatcgacattaaacgcatcattgagcacctgcgcgacagcggcctgggcgtgctgatcactgaccacaacgtgcgtgaaacactggcggtttgtgaacgcgcttatatcgtcagtcaggggcatttgatcgcccacggcacgcctacagaaatcttacaagacgaacacgttaagcgtgtataccttggggaagacttcagactctgatagggtagaagtttgcgacgttttagcaggagagtacgattctgaacatgaagcaaggtttgcaactcaggcttagccaacaactggcgatgacgccacagctccaacaggcaattcgtctgttgcagttgagcacgctggaacttcagcaggagctacagcaggcgctggagagtaatccgctgcttgagcaaatcgacactcatgaagaaatcgacacccgcgaaacgcaagacagtgaaacgctggacaccgccgacgcgctcgaacaaaaagagatgccggaagagctgccgctcgatgccagttgggacaccatttacaccgctggtacaccatccggcaccagcggtgactacattgacgacgagctgccggtctaccagggcgaaacgacgcagaccttgcaggattacctgatgtggcaggttgagctgacaccgttttccgacactgaccgcgctattgctacctctatcgtcgatgccgttgatgaaaccggttatctgactgtcccgctggaagatattctcgaaagtataggcgatgaagagatcgacatcgacgaagttgaagccgtccttaagcggatccaacggtttgatccggtcggtgtggcggcaaaagatctgcgtgactgtctgctgatccaactctcccaattcgataagaccacgccgtggctggaagaggccagactgatcattagcgatcatctcgatctgttagccaatcacgacttccgcactttaatgcgcgtcacgcgtctgaaagaagatgtgctgaaagaagccgtcaatctgatccagagcctcgatccgcgccccgggcagagcatccagactggcgaacctgagtatgtcattccagatgtgctggtgcgtaagcataacggtcactggacggtagaactcaacagtgacagcattccgcgtctgcaaatcaaccagcactacgccagcatgtgcaataacgcgcgcaacgatggtgacagccagtttatccgcagcaatctgcaggatgccaaatggttgatcaagagtctggaaagccgtaacgatacgctactgcgcgtgagtcgctgtatcgttgaacagcagcaagccttctttgagcaaggtgaagaatatatgaaaccgatggtactggccgatatcgcccaggctgtcgaaatgcatgaaagcacgatatctcgcgtgaccacgcaaaaatacctgcatagtccacgaggcatttttgaactgaagtatttcttttccagtcacgtcaataccgagggcggcggcgaagcttcctccacggcgattcgtgcgctggtgaagaaattaatcgcggcggaaaacccagcgaaaccgttgagcgacagcaagttaacctctttgctgagcgaacaaggtatcatggtggcacgccgcactgttgcgaagtaccgagagtctttatccattccgccgagtaaccagcgtaaacaactcgtttgacccaaccgataaggaagacactatgcagctcaacattaccggaaataacgtcgagatcaccgaggcactgcgcgaatttgttacagccaaatttgccaaacttgagcaatattttgaccgaatcaaccaggtctatgttgttctgaaagtggagaaagtcacccacaccagtgatgcaacactgcatgtaaacggtggtgaaattcatgccagcgcggaaggtcaggacatgtacgctgccattgatggcttaattgataagctggcacgccagttgaccaaacataaagataaactgaaacaacactaattgtccgggcaattagcatgtgcatggcggtctgttgtgcggcacaacgggccatttgtacggttaatgctccgagcctgttccactgtttgagtgggcaggttcttaggtgaaattatgacaaataatgatacaactctacagcttagcagtgttcttaacagggaatgtacgcgaagccgcgtccactgtcagagcaaaaaacgcgccctggaaatcatcagcgagctggcggcgaaacaacttagcctgccgcctcaggtggtttttgaagctatcctgacgcgggaaaaaatgggcagtaccggtatcggcaatggtattgccattccgcatggcaaactggaagaagatactctgcgcgccgttggcgttttcgttcagctcgaaacgcctatagctttcgatgccatcgacaaccaaccggtggacttactttttgccctgctggtgccggcagaccaaactaaaacgcacctgcatactctgagcctggtggcgaaacgtctggcggacaaaaccatctgccgccgtttacgcgcagcccagagcgatgaagagctgtatcaaatcattacggataccgaaggtactccggatgaagcgtaattattcggtaatgtctcttttagacgttgtgaggagaaacagtacatggtactgatgatcgtcagcggacgtagtggtagtggtaaatctgtcgccctgcgtgcgctggaagatatgggtttttactgcgtggataaccttcccgtagtgttgttacccgatctggctcgaaccctggccgatcgcgagatttctgccgccgtcagcattgatgttcgtaatatgccggagagtccagaaatattcgaacaggcgatgagtaacctgcctgacgctttcagtccgcaactcctgttcctggatgccgaccgtaataccttaattcgtcgttacagtgacacgcgccgactgcatccgctttccagcaaaaacctgagcctggaaagtgctatcgacaaagaaagcgatttgctggagcctctgcgtagccgagcggatctgattgtcgataccagtgaaatgtccgttcacgagctggctgaaatgctgcgtacccgtctgctgggtaaacgtgaacgcgaactgaccatggtctttgagtctttcggcttcaaacacggtatccctatcgatgcagattacgtctttgacgtgcgcttcttgccgaacccgcactgggatccgaaactgcgtccaatgacaggtcttgataaacctgtcgccgcgttcctcgaccgccacacagaagtacacaattttatctaccagacgcgaagctatcttgagctatggttacctatgctggaaaccaacaaccgtagctacttgacggtcgccattggttgtaccggcgggaagcaccgtagcgtgtatattgcagagcaactggcagactacttccgcagccgcggtaaaaacgtccagagtcgccatcgtacgctggaaaaacgtaaaccatgaccgtcaagcaaactgttgaaatcacaaacaagctgggcatgcatgcccggcctgcaatgaagctgtttgaattaatgcagggttttgacgctgaagtgctcttacgtaatgacgaaggcaccgaggctgaagccaacagcgttattgcgctgctgatgttggattctgccaaaggacggcagattgaagttgaagcgaccggtccacaggaagaggaagcactggccgccgttatcgccctctttaattctggttttgatgaagattaatcttcatcactttgacatacaactcccttcaaactccccccgacaataagaaaatcacgtactgaaatcgttctcaatcaacgtcatttgtacattttgtgcgcttttcactttcagaagaaccttaagaaaaccttaagaggcattgtttaggttttgtttaagttaatcgaccatactggagatcgtcagaaaatatttccaggagatggcatgattcgcttatctgaacaaagtcccctgggcaccggaagacatcggaaatgttatgcgcatccggaagatgcccaacgctgtatcaagattgtctaccatcgtggcgatggtggcgataaagagatccgccgtgagttaaagtactacgcgcatcttggtcgccggttaaaagactggagtggaataccgcgctatcacggtaccgttgagacggattgcggaaccggttatgtctacgatgtgattgcagattttgacggcaagccttccattacgctgaccgaatttgctgaacaatgccgttacgaagaagacattgcacaactgcgccagctactgaaacagctgaagcgttatttgcaggataaccgtatcgtgacgatgagcctgaagccgcagaatatcctctgtcaccgcatcagtgagagtgaggttatcccggtcgtctgcgacaacattggtgaaagcacattgattccactggcgacctggagcaagtggtgttgtctgcgtaagcaagagcggttatggaaacgatttatcgcccaaccggcgctggctattgccctgcagaaagatctgcaacctcgtgagagcaaaacgctggccctcactagccgcgaagcttaatccagctggtgttgttgcataaacggctcaccgcctaactgatacatctgccgtaaaatccacgcctgacggctacgcacgtagccgcttgggctggagactttgaaacgaagtggattaggtaatacagctgccagtaatgcagcttcgctccgggtaagtttgctcgcgggtttgtggaaataacgttgtgccgcagcttcgacgccaaacacaccgtcgccaaattcggcgatattcaggtaaaccgtcaggatacgctttttgctccagaccgtttctatccccagcgttaatccggcttccagcccttttcgaacccagctacgcccatcccataaaaagagatttttggctgtctgttgagaaatcgtactagcaccgcgaatacggttttcattgcgctcgttgtgcgccagggctttctcaatggaagcgacatcaaagccccagtgctcaggaaatttctgatcttctgcggcaatcaccgccagtcccatccacgggctgatttgatccatactgacccagtcagaatgtgccacgtaacgaaaattgccatgcagccaggcgctgacctgtcgctcgaccattaccgcactgaagggaacaggcgcaacgctaaacaacgcgatgcccccgccccagaaaacggcgaggacaaccattaaccgcaaaagaaaacggcgaacgaaactaaacaccgttaagcggcttttactcattcagccagaaccagcacgcgggaaaccagcttatcaatgccgctcgccgcttctgcaatgttctgcgccagcatatatgctggggtggtgacaatcttattgtcttcatcaaccacgatatcatcgacaggacacggcacatgctccgcgcccatctcttccagcacttctgcggtatcgatatcagtaccgatggtcaaacgcagcgggaaatcgaaaattttcggcagcatcgccggggcaatacacataaaaccaagcggttttccggcctgatgcatcgcttgtgccagcgcctttaattcacggtcaacggtgcattcgctaccaagactggcaaaattgcttaaattcttcgccgcgccaaacccccccggcacaatcaacgcatccagttcagcggcatcggcctgggccagaggacggatttcaccgcgcgttattcgtgccgcttcaatcagcacattgcgcgtttccgtcatcgcttcgccagttaaatggttgataacatcaacctgctgcttatccggtgcaaagcagaccgcctgcgcaccgctgcgactaatagctaacaacgtcaacaccgcttcatgaatttcagaaccgtcatagacgccgcatccgctcagaattacgccaattttcttcattgtgatcatcctttcgcaattgactgaaacacattaatttttttaataaaaatggtacgcatcacacatttaactgattcatgtaacaaatcatttaagttttgctatcttaactgcgtgcggcctgaaaaacagtgctgtgcccttgtaactcatcataataatttacggcgcagccaagatttccctggtgttggcgcagtattcgcgcaccccggtctagccggggtcattttttagtggcttttgccacccacgctttcagcacttctacgtcgtgacgccactcttctttcatctcttcaatccattcaccgacgttatcttcccaggccggaaggtcaggagactgaatttgctgacccagctgttgcagatggcgtaaccccacactccccgccgcacctttaattttatgtccttcctcaacaatgccttttttatcctgcgccgtcagattgctctccagcacgctgacatagcccggcatcatcttctcaaacaccgctaacccgtcggtgatcagcttcggtcctacaagttcgagatactgttccagcatgggaatatcgagcaatgcttcacttttactgttctcttctgtcgtcaccgtactctcctcatcatcctgggtatcccagaatttcttgatcatcgcggttagcgccggaacagaaagcggcttactcagcacatcatccattccagcattgaggtactcttgtttgtctttcagcacgttagcggttaaggccaccagcggcggtaaatcctcgcgcggataacgtttcgtcagttcacgagagatatccagcccggtcatatctggcaactgaatatccagcaacaccaggtcgtattcgcccggtttaaacatctccagcgccgccttgccggtcatggcgacatcaacgctgttacctaatttttccagcacagaacgcgcaacaatcacgttcagttcaatgtcttccaccagcagcacattcagcgccggtaaaggcatatcgtcttcatcaaacgcatcatcgacctcttctgctacgctcggtgcgtggatcgtcaacgtaaaggtactacctttgccctgttcgctggtaaccgtaatatcgccgcccatatttttcgccagacgacgagaaacggccagaccaataccggtgccggtggcaggtttaccgccatgactgtctttcacctggtaatacatggcgaaaattttatccagctcatcctgcggaatgccgataccagagtcttccacttcaaaatgcagcatatcgccttcatcgtagcgcacgcgcacggtaacctggccttgctgggtgaatttgacggcgttactgatgaggttccacaggatctgccgtaaacgcgtcccgtcggtaatgacctgatgcggtaatggcagcgtcggctccaggttaaagcgcaatcctttttgttgcgcctgcaatgcggagagattttccagatcggcaaggaagctggtgaaatcaaccggttgattatcaagctggaccttgcgccgttccatcttatccatgtcgataatatcgttaaagatattccccagcgtgacggcgctaacatggatggtcttgagatatttttcctgctcggcggtgagttcggtatccagcagaatgcggctcagaccgacgataccgttcagcggtgtacgcaattcgtgactgatggtggagataaacgtcgttttgtcgcggctggcccgttcaagcgcatcctgataccgcttacgctcggtaatgtcgcgaccaaagcccatcaaaccgtgacgtttacccacgcggtcgtagtacggcactttacggatttcaaagcaggctttgcgcccgtccgggtaatccagccactgttcataggtcagactcacattatgacggaacactttttcatcggtttcaatgacttttgcggcggcttccggactgtaaacatcagcaggtttcaggtgaaccagttgtttttcgctttttccggtcagcagctccatcgcgcggttacagccggaaaactctttatcttcgttacgataaaaaaccaggtcgggactagcatcaaggaaggaacgtaagaaactggattgctgctcgagctgaatttgtgtctcttcgcgctctttgatttcaattttcagttggccgaaggtttcctgcagttctgcttccgctttttcacgaacggcaatttcctgatttagctgggcaatattatcttttaactgaacgttgaggctcaaatcgcgctcgcgcatctcctccagtttttgcaccagccgactcagacgttgtcgactctcctccagttgctcgacgaccacgcttagaaagtagaccgcccacggcgtaatcagcaaaccaaagaagatagaacgaataacatcaatgctttcgacctgaccatgcagcaccatggttaccgccatttgtaccacaatggcaagaacgacgagggccagcgccagcaacatactgaagcgcaccagacctaacttcatcatcaggtcaacataatactgcgccagcagacgaatttgcttcattagggaattccttcacgacaacctgccccaataatacccaattctgacagttacgttataaattgtgtgagaaatgcggaattcccctcaacgacttactccgttggaggtagccacggacgtcccagcgcgcttccctgtacgccatgttcattcagatagcgatccagctcgaccattcccgtccatcgattttcgcaccacagcggagcaagcagcgtcgggcgacgggcgctggcggaaatgcggtggtagatcacttccggtggcgtatggcgaatcatttctccggcagtgagcgtgtaatcctccagttcaataccgttcaaacgccccgcttcccaggctttcgccataatgctgcctttcacaatatgcagcggatgcagctttatgccgtccacgccggtttcaaccactcgctccagcgtttgcaaacattcagcctgcccttcgccaggcaggccgacaattaagtgggaacacaccttcagcccgcgctgacgtgccagctgggttgtacgctgataacaggcaaaatcatggccgcggttgatgcgatgcagtgttttgtcgtgggcggtttgtagccccagctccagccacacttcgtaaccctggtccttatattcgcaaagcagatccagcaccgcatccggcacgcagtccgggcgggtacccacacacaaaccgacaatattggcctggctcaccgcctgctgatacatagaacgcagcacctgaacttccgcaaaggtgctggtatacgcctgaaagtaggccagatagcgtttagcgcggttaactaaattcgcctggtgcgccagttgctcggcaatggaacgatgctgctgcgcttcatcggcaaagctggcaacattacagaatgtgcagccaccacgcccgatggtaccgtcacggttagggcagctaaaaccgccgtgcagcgtcagcttatgcaccttttgcccataacgacgggtgagatcaccaccaaacatattgactaatttctgtaactgcataatctgatagaccgcgccttgaaaagaggccaaagcctgccatttttagctcaattcggcgatgacctggatcaatcgtcccggcctgcttttatcaactgcataatcaatcaaaattaccgaaatttcatgcataatcacataaatcacttttgcttatcttgtgtcagatttttttatctcctgatggattttaggcaaaaacagtagcatgaaacgtcattaccaattaaggcagtataaaatgctggttttgtcgtcagttcaaggcaggataagggttaacacacctttatgacagtcaggaattgactgtttctctaacgacttcccttttagccttaaagataaaatccattttaatttcagtcatttaataaagaattttgcgctaaagcacatttctgtaccaataagcttgccatttgacctgtatcagctttcccgataagttggaaatccgctggaagctttctggatgagcagcctgctcatcatatttatgcagtaattgagatcccctcttcaccgtattaaccgatgcgaaaaggacaacaagggggcgaatgcgaggcgcgcgtatgacacgcaaaccccgtcgccacgctctttctgtgcccgtgcgcagcggtagcgaagtggggttcccgcagagcctgggggaggttcacgatatgttgtacgataaatcccttgagagggataactgtggtttcggcctgatcgcccacatagaaggcgaacctagccacaaggtagtgcgtactgcaatacacgcactggcccgcatgcagcaccgtggcgcgattctcgccgatggtaaaaccggcgacggttgcggcttgctgttacaaaaaccggatcgcttttttcgcatcgttgcgcaggagcgcggctggcgtttagcaaaaaactacgctgtcgggatgctcttcctgaataaagatcctgaactcgccgctgccgcacgccgcatcgttgaagaagaactgcaacgcgaaaccttgagcattgtgggctggcgtgatgtccccactaacgaaggcgtgctgggtgaaatcgccctctcctctctgccacgcattgagcaaatttttgtgaacgccccggcaggctggcgtccacgcgatatggagcgccgtctgtttatcgcccgccgccgcattgaaaagcgtctcgaagccgacaaagacttctacgtctgtagcctgagcaatctggtgaacatctataaaggtctgtgtatgccgacggatctgccgcgcttttatctggatcttgcggacctgcgtctggaaagcgccatttgcctgttccaccagcgcttctccactaacaccgtaccgcgctggccgctggcgcaaccgttccgctatctggcgcataacggtgaaatcaacaccatcaccggtaaccgccaatgggcgcgtgcgcgtacttataaattccagacaccgcttatccctgacctgcacgacgccgcaccgttcgtcaacgaaaccggctctgactccagtagcatggataacatgctggaactgctgctggcaggcgggatggatatcatccgcgccatgcgtctattagtaccacccgcctggcagaacaacccggatatggacccggaactgcgtgccttctttgactttaactccatgcatatggagccgtgggatggcccggcgggcatcgtgatgtccgacggtcgttttgccgcctgtaacctcgaccgtaacggtctgcgtccggcgcgctacgtcatcaccaaagataagctcatcacctgcgcctctgaagtcggtatctgggattaccagcctgacgaagtggtcgaaaaaggccgcgtcgggccaggcgaactgatggttatcgacacccgcagtgggcgtattctgcacagcgcagaaaccgatgacgatctgaaaagccgccatccatataaagagtggatggagaaaaacgtccgccgactggtaccgtttgaagatctgcccgatgaagaagtgggtagccgcgaactggacgacgacacgcttgccagctaccagaaacagtttaactacagcgcggaagagctggactccgtaattcgcgtactgggcgaaaacggtcaggaagcggtcggtagcatgggcgatgataccccattcgccgtgctctccagtcagccgcgcattatttacgactacttccgccagcagtttgcccaggtgactaacccgccaatcgacccgctgcgtgaagcgcatgttatgagcctcgccaccagtatcggtcgtgaaatgaacgtcttttgcgaagcagagggccaggcgcaccgtttaagctttaaaagcccgattctgctctactccgatttcaaacagctcacgacgatgaaagaggagcactaccgcgcagatacgctggatatcacctttgacgtcactaaaaccacgctcgaagcgacagtcaaagagctgtgcgacaaagccgaaaaaatggtacgtagcggcaccgtgctgctggtgctctccgaccggaatatcgctaaagatcgcctgccggttccagccccgatggcggttggcgcgatccagacccgtctggtcgatcaaagcctgcgttgcgatgccaacatcatcgtcgaaaccgccagcgcccgcgatccgcaccacttcgccgtgttgctgggcttcggcgcgacggctatttatccataccttgcctatgaaacgctgggccgcctggtagacacccatgcgattgccaaagattatcgtaccgtgatgctcaactaccgtaacggcatcaacaaaggcttgtacaaaatcatgtccaaaatgggcatctccaccatcgcctcttaccgctgcagcaaactgtttgaagcggtcggtctacacgatgatgtagtgggcctgtgcttccagggggcggtcagccgcattggtggagcaagctttgaagacttccagcaggatctgctgaatctgagcaaacgtgcctggctggcgcgtaagcccatcagccagggcggtctgctgaaatacgtccacggcggcgaataccacgcctacaacccggacgtggtgcgcacgctgcaacaagcggtacaaagcggcgagtacagcgactatcaggaatacgcgaagctggttaatgagcgtccggcaaccacgctgcgcgatctgctggcaattacgccgggtgaaaacgcggtcaacattgctgatgttgaaccggcaagcgaactgtttaaacgctttgataccgccgcgatgtctatcggcgcgttaagcccggaagcccacgaggcgctggcggaagcgatgaacagcatcggcggtaatagcaactccggtgaaggcggcgaagacccggcgcgctacggcaccaacaaagtgagccgcatcaagcaggtggcttccggtcgctttggggttactccggcgtatctggtcaatgccgacgtcattcagattaaagtcgcccagggcgcgaagccaggcgaaggcggtcagttgccgggtgataaagtcacgccttacatcgccaaactgcgctatagcgtgcccggagtgacgctgatctccccgccgccgcaccacgatatctactctatcgaggacttagcgcagctcattttcgacctcaagcaggttaacccgaaagcgatgatctccgtgaagctggtttccgaaccgggagtaggcaccatcgcgactggcgtggcaaaagcttatgcggacttgatcaccatcgcaggctatgacggcggcaccggcgcaagtccgcttagtagcgtgaaatacgcaggctgtccgtgggagctggggcttgttgaaacccagcaggcgctggttgctaacggcttgcgtcacaagatccgtttgcaggtcgatggcggcctgaaaacgggtgtcgatatcatcaaggcggcgattctcggcgcagaaagcttcggcttcggcactggcccgatggtggcgctcggctgtaaatatctacgtatttgccatctgaacaactgcgcaacgggtgtagcaactcaggatgacaaactgcgtaagaaccactatcacggcctgccattcaaggtgacgaattactttgagtttatcgcccgtgaaacccgcgagctgatggcacagcttggcgtaacacgtctggtggatctgattggtcgcaccgacctgctgaaagagctggacggtttcaccgccaaacagcagaagctggcgctgagcaagctgctggagactgccgaaccgcatccaggtaaggcactctactgcaccgaaaacaacccgccgtttgataacggcctgctgaacgcgcagttgctgcaacaggcgaaaccgtttgtcgatgagcgccagagcaaaaccttctggttcgatattcgcaacaccgaccgttctgtcggcgcgagccttagtggctatatcgcccagacgcacggcgatcaggggctggcagccgatcctatcaaagcgtacttcaacggcaccgcaggccagagcttcggcgtgtggaacgcgggcggcgtggaactgtacctgaccggtgatgccaacgactatgtcggtaaaggcatggcgggcggcttaatcgccattcgtcctccggttggttccgccttccgcagccatgaagcaagcattatcggcaacacctgcctgtatggcgcgaccggtggtcgtctgtatgccgcaggccgcgcgggtgaacgtttcggcgtgcgtaactccggtgctatcaccgtggtagaaggcattggcgacaacggttgtgaatatatgacgggtggtatcgtctgcattctgggtaaaaccggcgttaacttcggtgcgggcatgaccggcggtttcgcttacgttctcgatgaaagcggcgatttccgcaaacgcgttaacccggaactggtcgaggtcttaagcgttgacgctctggcgatccatgaagagcatctgcgtggtcttatcaccgagcatgtgcagcataccggctctcagcgcggtgaagagattctggcgaactggagtaccttcgccactaaatttgcgctggttaaaccgaagtccagtgatgtaaaagcactgctgggtcaccgtagtcgtagcgcagctgagttgcgcgtgcaggcgcagtaaggggtagcaacaatgagtcagaatgtttatcaatttatcgacctgcagcgcgttgatccgccaaagaaaccgctgaagatccgcaaaattgagtttgttgaaatttacgagccgttttccgaaggccaggccaaagcgcaggctgaccgctgcctgagctgcggcaacccatactgcgagtggaaatgcccggtacacaactacatcccgaactggctgaagctcgccaacgaggggcgtatttttgaagcggcggaactgagccaccagaccaacaccctgccggaagtttgcggacgagtctgcccgcaagaccgtctgtgcgaaggttcctgcactctgaacgatgagtttggcgcggtgaccatcggcaacattgagcgctatatcaacgataaagcgttcgagatgggctggcgtccggatatgtctggtgtgaaacagaccggtaaaaaagtggcgattatcggcgcaggcccggcaggtctggcgtgtgcggatgtcctgacgcgtaacggcgtaaaagccgttgtcttcgaccgtcatccagaaattggcgggctgctgaccttcggtattccggccttcaagctggaaaaagaggtaatgacgcgtcgccgtgaaatcttcaccggcatgggtattgaattcaaactcaataccgaagtgggccgcgacgtacagctggacgatctgctgagtgattacgatgccgtgttccttggcgtcgggacttatcagagtatgcgcggcgggctggaaaacgaagacgccgatggcgtgtacgcagcgctgccgttcctcatcgccaacaccaaacagttaatgggctttggtgaaacccgcgacgaaccgttcgtcagcatggaaggcaaacgcgtggtggtccttggcggtggcgacactgcgatggactgcgtgcgtacgtccgtgcgccagggagcgaagcacgttacctgtgcctatcgtcgtgatgaagagaacatgccgggttcccgccgcgaagtgaaaaacgcgcgggaagaaggcgtagagttcaaattcaacgtccagccgctgggtattgaagtgaacggtaacggcaaagtcagcggcgtaaaaatggtgcgtaccgaaatgggcgaaccggacgccaaaggccgtcgccgcgcggagatcgttgcaggttccgaacatatcgttccggcagatgcggtgatcatggcgtttggtttccgtccacacaacatggaatggctggcaaaacacagcgtcgagctggatagtcaaggccgcatcatcgccccggaaggcagcgacaacgccttccagaccagcaacccgaaaatctttgctggcggcgatatcgtccgtggttccgatctggtggtgaccgctattgccgaaggtcgtaaggcggcagacggtattatgaactggctggaagtttaagcgaggtaacaatgaattcgccagactgtgtctggcgaatcaaattactgacgaagtgcgcgttgttttctggcaaatgcggcatgagcgtttgacctttcctataatagggataattttcaataaattgtgctttgttcaccaagtctgatgagtgaagcacatcaagcaatttctcatttacaatccgtctcaattacttgttaacacctctgacaataccgattctgcaagctattcagtcttttcattccatgtaaattgtctcgatattaatatacaaaatatgaatataaaaaaccaatatattatccttaattatctatatattttcctatttttcagcgcaaacattcatgtaatgaataattatcaccacaaaccacctcaccagcaccttattattcacatgatcgtaactataaaattcattaaataaatacatcccagcaagttggctatttctgaacgagttatttatttacattcacaaacagatatatatactgcttcagctttttattttaaaaaataaatttgttattaaggatatgttcatatgtttttcaaaaagaacctcacaacagctgctatttgtgcagcactttctgttgcagcattcagtgccatggcaacagatagtactgatacagaattaactatcatcggcgagtatacccctggtgcatgtaccccagttgttacgggcggcggcattgttgactatgggaaacatcataacagtgcgctgaatccgaccggtaaaagtaataaactggttcaactgggccgcaaaaacagcacattaaatataacctgcacagcaccaacgctaattgctgtaacctccaaggataaccgtcagagcaccattgtagcgttaaacgacacatcctatattgaaaaagcttatgatactctcgtagatatgaagggaacgaaaaacgcctttggtttaggttctgcgcctaatggacaaaaaattggcgctgcatccattggtattgacaggtctaatggtgggattcacgcggcggacgatacaggtgaaattcctgtcgacctgattcaaactgaccactggagtgcagcgacccccacatggaaagccagttctaatggcgcattctgcagcctgacaagttgcagtgcaatcgagcgcggttattctgttgcaaaaacaggggaactgacacctgttgctattacagcggtcaccttcccgttactgattgatgctgcggtaaatgacaatactattcttggttctgatgaaacgatcaaactggatggtaacgtcactatcagcgttcagtatttataagaacttgtaatacagtttttatttttacgcattaaccagttagctataactcggacagattatgccctatgacatggtctgtcttaatcaatctcatcgcaaacagtgcataacatatattaacaatatgtttctgcgttatttatcattattacaggagttttaatttaaatgctcagacacattacattcactgtatttataacaacatcaatgaatactaacaatgccggacaggagtactatcaggcattcgttttatacgatcggttaatgtttcaggaaagctcttcgcatatcttggggaaagtaaatgtaatacgctgttcttaattgttcagtgctcaccccccagagtatagctcattccattattcaacttagctccatataaagggacagataatggaaagcctcagtgaaggaaccacagcaggctaccagcaaatccacgacggtattattcatctggtcgatagcgcccggacggaaacggtacgtagcgttaacgcgttaatgaccgcgacgtaccaggaaattggccgacgaattgtcgaatttgaacaaggtggcgaggccagggctgcgtatggtgcgcagctaatcaagcgactaagtaaggatttatgtctaaggtataagcgtgggttctctgcaaaaaacttacgccaaatgaggcttttttacctcttttttcaacatgttgaaattcaccagacaatgtctggcgaattaacaccattgggaattccgcagacaccgtctgcagaattcccaagcgcaaagatttggcagacgctgtctgccaaatctttccccttgcccaggtccacctacgtccgtttactttccgttaaaaacgctgacgcccgcagcttttatgaaaaagagacgctccgctgtggctggtctgttcgccagctagagcggcaaattgcgacccagttttatgagcggacactactgagtcatgacaaaagtgccatgctgcaacaacacgctcctgccgagacgcatattcttccgcaacaggcgatacgcgatccctttgtgctcgaatttctggaattgaaagatgaatatagtgaatccgattttgaggaggcgctgatcaaccacctgatggatttcatgctggaacttggggatgattttgcctttgttggtcggcagcgaaggttacgcattgatgacaactggtttcgtgtcgatctgctgtttttccaccgccgtttacgctgcctgctaatcgtcgatctaaaagtgggcaaattcagctatagcgatgccggacagatgaatatgtatctcaactacgccaaagagcactggacgctaccggatgaaaatccgcccatcggtctggttctctgtgcagagaaaggagccggagaagcgcattatgctctggcaggtttgcctaacaccgttctggcaagcgaatataagatgcaactacctgatgagaaacgactcgcagatgaactcgttcgaacacaggcggtgctagaggaaggctatagacgccgttaatttcagcggtttcgaattctgcagacagtgtctgcagaatctttaaaacgaactaagttttaagccattaaatcagccttaaccttcaccacaacctttttaatctctccaggctcgccgacaacgcatcctggtttatgcggttcacctggcataaacacggcgaacattcccggttttaagatgatggcttgctcgttatcaatggtgctgcaaagctgataatcatcctcatggtggaactcttcacactgacgcgcagtgcctgccatgccaaacagaatccgttcctcaccgtttaataacagctggatatcaatgtattgctcgtgcaattccgcttttttctcgacggggctttgagtgttaaacgtcatgacattcataaagatattgtcgccctgtaattcgtaacgacccggcgctttttcttgcggtctggcagctaatgccagcgttaacgcgtcctgtaacgcaggatgtaacccagcagacggtaaactctgtacttcacccatcatcataatttttctccctgggccaacagcgtagccccaagtaaacctgcatcatggcggtaatgcgccgccagtaaatcaacatgaaatgccgctggctcctgcgccagatacgtttccaccagcgccagatacccttctgccagaccaacgctgccaccgaccaccacgcactggcaatcagttgtggctttaatatcagcgatcagccttgcaagcgtacgtgcggagcggtgaatcagctgctgcgcctgctcgtcaccctgcccggcgcgcgtgaaaatagttttcgcatccgcgccagccaactccccctgcgctgccgctgcaatgccgcgaccagaagcaatcgcttccacgcaacctgtgcgtccacagccgcagactgggccgtgtggatcggcaagcgtatgcccgatatgccccgccagaccgccagggccggtaagcagtttgcagccgctcactacaccgccgccaacgccggtggaaacggtgataaagaccatatcggttatatcgccatccagcgcctgaaactccgcccatgctgcggcctgcgcgtcgttaatggcaatggtcggcaaattggtaagttgttccagcgttttgactaacggaaagtgtagcaatccaccaagattatgcggattaagtgccagcaagctgccgtcacggattatcccggtgctagcgatggcaacccgctgcgcatgagcttgcaacggagagactaatgcggataaggcatcacgcaaggcttctggtgtctggctggctggcgtaggaagttcacgacgatcgcggatctgcccgtcagcgccaatcagcgcggcggcaagtttagtaccgccgatatcaatcgccagtgtggtcatagcaccgcctttttcatcgctgtgttgtaccactgacaaatgtgctcaagacgcgtgattgcagaaccgaccgtcaccgcccacgcgccgtggcgcatcgcatccgccgcctgagcaggcgtgttgtaacgcccttcggcaatcacccgacatccggcgtcgctcaacgttttcaccagcgccagatccggctcttctggcgtttcaggcgtggtatagccagaaagcgtagtgccaataatttcggctcccagcttttggcatgccaggccgtcttccggcgtactgcagtcggtcatcgccagtaaaccgtgatggtgaatacgtgccagcagcgtttcaacaggcaccggacgcgggcggtcggtgccgtcaatggcgataatgtccgcgcccgcctgcgccagcgcatcaacatcttcaatataggccgtgatgcgtaccggagaatcctccagatcgcgtttcacaattccaataatcggcacgctcaccaccgcacgcgtggcttgcagatttgccacaccttcaatgcgaatggcaaccgcgcccgcctgttctgccgctaatgccatggcggcgacgatttcgggtttatcgagcgggctgtccggaaccggctggcaggagacaatcaggccaccgttagcagcgattttttgatccagttgtgcaagtaagctcatacatcttcccttagcgaaaggcccggtacatagaccgggcaacaggattaacttttggttttgactaaatcgtttttggcgctgccaaacggcacggcaccgctgaatggtttaccgtcgatagcgtcatgagtacgcaacgcttccgggcgcaaccaacgctgaacgcgagaaggcatatccagcccaatcagcaggatcaccacgaacgtcagactgaagctgaggcttgccagcgcagtacccagatccagacgttgagcgatcaacgcgccgatgattggggccagtgcaccgcccaatgcgccaacgttgtaggtaaagcccaggcccgctgcacgctggtcggtatcgaaataaccgccaatcagttttggtaagatcccggcgatcccttgtccaagcatttgctggaagaacagtaacagaccgagcacccagacgtttgcgccgccaatcgcaaataccggaataatcagcagctggctggccagcaggctacaaacgtacgctttgcgggttcccagccagtcaccgaggaagccacctacgcagcatcccaccgccgcgccaaagccactaaagaacagcacattggctacagtatgcgggttataagccagatcggttttcagatacgttggcagcagcgcctgaatcggccaactgtagaggaaagcaaacaacacgaccaccatcagcattacgcccgttggccagcgtttgcctgcactctgcaccataaagctgataaagattgcggcgcataacagcccaagaacagcgacgatcgcggcattttgcaggttaccggcgaagcagaaccacagcgcagtagccgccgccagtgtcattacgatattggcaatgcgatgttcaccacggtagagaatatccaccattgtgcgtactggtgctttacctgcgtgtttctctttccagtcttccgcttccgggatgtttttacgcagccagagagcaaagatgattggcaaaatgccgataaagaacagcgcacgccagccccagaccggaaccaccaggctatagacctgagcggcaacgacggcccccacagagaagccactaatcaaaaaaccactggctttgttacgcagatgttttggccagctttcaatgacataggtggcgctggaaccgtattcacccgccatccccatgccgatgaccagacgagcgataaacatggtgatgtagcctggcgcaaagccgcaggccagcgtcccggcgctgaagagaacgatgctggtgaccattgccagacgacgcccgtagcggtcacccatagcgccgagcatcaggccgccgaaccagcgagagataaaggctgcagagatcagacttgccgcctgcaccgtcgtcagcccgaattcaccttgtacttcggtgagtaccagggcgattaaaacgaaatcaaaaccgtcaagcagatatcccaaccaggcagcggaaaatgcgcgccattgtgcacggttgagatggcgataccacgggatattctgggttgtagtactcattgtgagtctcccgcggtgggcgatgcccacacgctttggtatgaaaattgtagggtacagatgcgtttatttcccctcacccggtaggggcgagcgaggggaaacaactcacccgcgctcttgcatcaactgctgggccagcgccttcagttctggcagatatttttcatctaccggtccaaacggtttgcggcacagcggcacagaaacgacatccatataatggaggacagttttcaggccgcggaatacgcccgttttgatcagtaaatcaatgactttattgcattcagtttgcagtttctgcgcggtctggatatcgccttctttcagcgccttaacgatcccctgatagcgccagcccatgatgttgtaggtactgccgataccaccatcagcgcccgccagcagaccagaggcgaagatttcgtcgtaaccgttatagagcacaagatcaggatgttcacgacggatctgctccatctgatagagatcgccagaggtctgtttcagcgcacctacgccaggcaatgtaacaagtgtgttgatctgatccagggtcagttttaccccactcagggctggaatgttgtacaccaccatcggcaaaccatccgcgctatcaataattgcccgatagtgatcgcagtgttcttcaaagctgaaaggatagtagaacggcgtgacggcggagacggcatcgaagccataacgtttagcgcttgccgcaagttgttggctttcggcggtgctgacgcaaccgacgtgggcgatgagtttaatcttacctttcgcctcttcggcgacgatttccagtacctgttcacgctcggaaaggctttgtacaaaggcctcgccggtgctaccacccacgtataaaccgtcgatgccctgctgaatattgaactgaaccaggcgacgcagactcgctttatccagtgcttgttgttggtcaaaaggagtcaggagtgcagccattacgccacgtaaattcgttgccataaatacctctgaagtgatgcttgtctgataaacgatatacctttatacctgttataccagatcaattaagcaacaccccatacagaaagcttataatgcgatctgcttcactaaagtggcattatttctttttgttggtggtctgaccgaaagcgtgccaggtagcagagacgctgttgagatggctttgcaacgcacgatcggcttcgtcaggatcatgacggcggatcgcatcaacgatcgcaatatgctgttgataactaacgttgttatgttcgtgcagtgcctgatcggtaaccgttgggcgtgcggcaataagccagtcgagcagggcaacgtggatcgccatgaagattgggttaccggggatctccgccagcacgcggtggaaatcaacgtcactacgaatgaatgccgcgttgttatccaggctctgactgttgatttccagtgcttttgccagcaaatcgatttgctcatcggtggcatgttcagccgcatagcgcaccagactggattcaaagaacagacgtaattgttcgaaatgggcaatcccaccgggatgagaaaggaaatctttcgccatgccggaaagctcaccgatgatagtgtccgcagaaggacggctgacgcgagcgcgttcgccgttgtttatttgcaccagacctttgcgttttaacgctgccagcgcttcacgcacgctaggacgcccgacgttaaagaacgccatcagttcgcgttcagacggtaattgttcaccttcgccaaattcacgacggcggatcatctgttccagctcttcttccaccatttcggagagttttttacgcgccagcgggcggctacgcaagttgcgaccaattgcaggactagaatcttcggtttggctatcaaatgcgttcataaggcccattctgtaaggtcagtgtgattaacatcatcagtgacatcctatcacaggattgaaagtaggggaaaatggcagggttttctctttgtgcctcatcattaccataattaacggaataattaactattgcgaaaaattaatgtaacgcagataaaaacatcccgtttgaattatttataagactattcacgagcattatgaatattatgaatgtgttcttacaaaataatcataagcgcatattttttaatgaaaaatcacctcacctacaattaaaaacacgacatccgcaccataaatagccttgcaaaaaatataacatcgttgttttcaatctgccgtttatgggattgaccgttttcttttgacacggagttcaacaatgttcggcataattatatctgtcatcgtattaattacgatgggctatttgatcctgaaaaactacaaacctcaggtggtgctggctgccgcaggtatcttcctgatgatgtgcggtgtctggttagggttcggtggtgtactcgatcccaccaaaagcagcggctacttgatcgtcgatatttataatgaaatcctgcgcatgctgtccaaccgcattgccggattggggctgagcattatggcggtgggcggttatgcccgctacatggagcgcataggggccagtcgcgcgatggtgagcttgttaagccgcccgttaaaactcattcgcagcccgtatattattctgagcgcaacttacgtcatcggccaaatcatggcgcagtttattaccagcgcctccggtctgggtatgttgctgatggtcaccttatttccgacgctggtgagtctgggagtaagtcgtctctctgcggtggcagttatcgcaaccacgatgtccattgagtgggggattctggaaacgaactccatttttgctgcccaggtagcgggaatgaaaattgccacatacttcttccactaccagcttccggtcgcctcttgcgtcattatcagcgtggcgatctcccactttttcgtgcaacgcgcttttgacaaaaaagataaaaatatcaatcacgaacaggcagagcaaaaagctctcgataatgtcccgccgctctattacgccattttacctgtgatgccgttaatcctgatgctcggcagcctgttcctcgcccacgtcgggctgatgcagagtgaactgcatctggtggtggtgatgttactgagtttgactgtgacgatgtttgttgagttcttccgcaagcataacttgcgcgaaacaatggacgatgtgcaggcgttttttgacggcatgggtacgcagtttgccaacgtggtaacgctggtggtcgcgggtgaaatatttgcgaaaggcttaacgacgattggcactgtcgatgcggttatcaggggggcggagcattctggtctgggcggtattggcgtgatgattattatggcgctggtcattgccatttgtgccattgtgatgggctctggcaatgcgccgtttatgagttttgccagtcttattccgaatatcgcagccggactacatgtaccagcggttgtaatgattatgccgatgcattttgccacgacgctagcgcgcgcggttagcccgattactgcggtggtggtcgttacgagtggaattgcaggcgttagcccttttgcggtggtgaagcggacagcgatccccatggcagtcggtttcgtggtgaatatgattgccacaatcacgctattttattaagtcattaaaaagacaaaacaggccgcctgggcctgttttgtattacttcacaacgcgtaatgccggtcgaccaccgcgtggtggctgcggaggttcatcgtcaggatgagtgtcatcatcgtgatctggcttgtcgccatcaataacgctcataacggtttcgttgtctgcgcttgcctcttcatcattcatgatgctggtatcttcatcgtaggcagcttcaggctcaaacatcgtgcctgcgccattttcacgggcgtagatagccagcacggcagccagcggcacagaaacctgacgcggaatgccaccaaagcgcgcgttaaagcgcacctcatcattcgccagttccagattgccgacagcacgcggcgcaatgttgagtacgatttgcccgtcacgcgcatattccataggaacctgcacgccagggagcgtcacatccaccaccaggtgcggcgtgagctggttatccagcaaccactcatagaatgcacgcagcagatagggacgacgtggtgttagctgactcaaatccatacagattaactccggcccagacgcatttcacgttctgcttcagttaaagaagcaaggaaagagtcacgctcaaagacgcgggtcatatagcctttcagctctttcgcacccgggccgctgaactcgatgcccagttgcggcagacgccacagcagcggagcaagatagcaatcgaccaggctgaactcatcgctcaggaagtacggcttctgaccgaagaccggcgcaatcgccagcagttcttcgcgcagttgcttacgtgcggcatctgcttcagaagcactaccgttgatgatggtgttcatcagcgtgtaccagtctttttcgatgcgatgcatgtacagacggctttcaccgcgagctaccgggtaaacaggcatcagtggcggatgcgggaaacgctcatccagatattccataatgatgcgagattcccacagggtcagctcacgatccaccagggtcggaacgctctgattcgggttgaggtcaatcagatcctgaggcggattgtccttttccacgtgttcgatctcgaaacttacacctttctcagccagcacaatgcggacctgatggctatagatgtcagtaggaccggaaaacagcgtcattacgctacgtttgttggcagcgacagccatgaaaacctccaggtatagtcagaatttttactgctaccagccaccaggtggccagtcagaagttgtgttacccaataaggaacgactctctttgttcgaaaatcaaacaaaaaatgagcaatacccgacatttgggcagaaaattggatgatagtttaccagattttgcgaccattgtggtgagtcgatgccggaaatggggaaaaagagatgcgctttagtctgaaatagttgacttagtcccttattggcgatgtggtttttgttttacctgtctgtcaggtggcagcaaaaagcaactttccagtttttacgctgattcagattttagctataaaaaaacccgccgaagcgggttttttcgaaaattgttttctgccggagcagaagccaattaacgtttggagaactgcggacgacgacgtgctttacgcagaccgactttcttacgttcaacctgacgagcgtcacgagtaacgaagccagctttacgcagttcagaacgcagggactcgtcgtattccatcagagcgcgggtgataccgtgacggatcgcaccagcctgaccagagataccaccacctttaacggtgatgtacaggtccagtttctcaaccatgtcgaccagttccagcggctgacgaactaccatgcgggcagtttcacgaccgaagtactgttccagagaacgttggttgattacgattttaccgttgcccggtttgatgaaaacgcgagctgcggaacttttgcggcgaccagtgccgtagtattgattttcagccattgcctataatcccgattagatgtcaagaacttgcggttgctgtgccgcgtggttgtgctcgttacccgcgtaaactttcagtttacggaacatagcacgacccagcgggccttttggcaacatgcctttaaccgcgatttcaatcacacgctcaggacggcgagcaatcatctcttcaaaggtcgcttgtttgataccaccgatgtggccggtgtggtgatagtacactttgtcagtacgcttgttgccggttacagcaactttgtcagcgttcagaacgatgatgtaatcaccggtatctacgtgcggagtgtattccgctttgtgcttaccgcgcaggcgacgagccagttcagtagccagacggcccagagttttaccggtcgcgtcaacaacataccagtcgcgttttacggtttctggtttagctgtaaaagttttcattaaaagcttacccaataaatagttacacgttggtgaacacccaaacgtcttcaattgttgaggttcacacgacaaagtccggcaaacctaccccttcgaatagcctatgccagcacacaaaaagttttgggaaaaaaactttcttgtaacgtggggtcgcaggattatagagaagtcggggtcaaagatcgacccctttttgtgatttgtgacaggttttaacccgccaaatgctcgcgcttcagatactcttcgctttgcatctcttgcagacgactcaggcaacgctggaactcaaacttcagccgatcgccctgataaatttcatacagcggcacttctgcactcaccactaatttgacatggcgctcgtaaaactcatccaccagcgcaataaagcgccgcgcttcgctctccatcaaccgcgtcataactggtacatcaaacaacatgaccgtatgaaagagacgactgagcgcaatatagtcatgctgactgcgggcgtcgacgcacagcgtagtaaaagagaccgccagcgtctggttctcgacgcccattgttgctaatggccgatggttgatttctaacgtcggactattttctcgtttcccccccgccagcgccaaccatagtttatccatttgcgcccgggtttcatcgtgaagtgggctaagccacagatgcgcctgagtgagtgtacgcagacgataatcaacaccagcgtccacgttcattacatcacaatgctgtttaatggcatcgattgcaggcagaaaacgcgcacgttgcaggccatttcgataaagttcatccggcggaatattactcgtcgctaccagggtaataccgcgagcgaacagggctttcatcagaccgccaagtagcatggcatcggtaatatcagaaacaaaaaattcgtcaaaacagagcacgtcagtttcggctttaaagcgatcggcaataatttccagcggatcggtctgcccctgtaaggcagttagctcttcatgcacccgcagcataaaacggtgaaagtgcaggcgctgtttccgctctcccggcaggctttgatagaaaaggtccatcagccaggttttcccgcgtcctacaccgccccacatatataagccacgcactggcgtatgctttgtgtcttcgcgtttaccccacagcttaccgacccgcgccattagcccactcgtcctgggggctggtggcgtgctattgatgagttcctgataaataatttccaggcggctgacggcctctttttgaacgtcgtcgggttgatggctgccttcattaagcgccttcaggtattggcttgttggggtaacgctttgcatgatcttattgttattccttgaataatcggtgcgccgttgttcacggttgacgaaaaaaaggccgttctacactacgcgatatgcagtcgggattccacttctgtggaattaacggttatagtggcataatcagccgcaggcatggagcctgaagccaacaccctacggaaacaaaagacaacgggagatgttcatgacctgggaatatgcgctaattgggttagtcgtcggcatcattattggtgctgtggccatgcgttttggtaatcgtaaactacgccagcaacaggcgttgcagtacgaactggaaaagaataaagctgaactggacgagtatcgcgaagagctggttagccactttgcccgcagcgcggaattactggataccatggcgcacgactatcgccagctgtatcagcacatggcaaaaagctccagcagcctgctgccggaactgtctgctgaagcaaacccgttccgtaatcgtctggcagagtctgaagccagcaacgatcaggcaccggtgcagatgcctcgcgactattctgaaggcgcatccggcctgctgcgtactggcgcgaagcgcgactaatttatttttcgggcgcagccattgcgccctcctcttctctccctccccgactatcatttaatctggtgtctcattgttagccgtctgaaaattcaataacatcaaactgttttgaatctcttttcttatcattcaggtacgagagcaggaataatgaaaaaacaaacccagctgttgagtgcattagcgttaagtgtcgggttaactctcagcgcgagttttcaggccgtcgcgagcattccaggccaggttgccgatcaggcccctctccccagtctggctccaatgctggaaaaagtgcttccggcagtggtgagcgtacgggtggaaggaacggccagtcagggacagaaaatcccggaagaattcaaaaagttttttggtgatgatttaccggatcaacctgcacaacccttcgaaggtttaggctccggtgtcatcatcaacgccagtaaaggctatgtgctgaccaacaaccatgtgattaatcaggcacagaaaatcagtattcagctcaatgatgggcgcgagtttgatgcaaaactgattggtagcgatgaccagagcgatatcgccctgttacaaattcaaaacccgagcaaattaacgcaaatcgctattgccgactccgataaattgcgcgtcggtgattttgccgtagcggtcggtaacccatttggccttgggcaaaccgccacctctggcattgtttccgcattaggccgcagcgggttgaatcttgaaggtctggaaaactttatccagacagatgcttccattaaccgcggtaactccggcggtgcactattaaaccttaacggtgagttaattggcatcaacactgcaatccttgcgcctggcggcgggagcgtcgggattggatttgccatccccagtaatatggcgcgaacactggcgcagcagcttatcgactttggtgaaatcaaacgcggtttgttaggcatcaaaggcaccgagatgagtgccgatatcgccaaagccttcaaccttgacgtgcagcgtggcgcgtttgtcagcgaagtgttgccaggttctggcagcgcaaaagcgggcgtcaaagcgggcgatattattaccagcctcaacggcaaaccgctgaatagctttgctgagttgcgctctcgtatcgcgaccaccgagccgggcacgaaagtgaagcttggcctgctgcgtaacggcaaaccactggaagtagaagtgacgctcgataccagcacctctagcagcgccagcgctgaaatgatcacgccagcgctggaaggtgcaacgttgagcgatggtcagctaaaagatggcggcaaaggtattaaaatcgatgaagttgtcaaaggaagcccagctgctcaggctggcttgcaaaaagacgatgtgatcattggcgtcaaccgcgatcgggtgaacagcattgctgaaatgcgtaaagtgctggcggcaaaaccggccatcatcgccctgcaaattgtacgcggcaatgaaagcatctatctgctgatgcgttaatgtcgtaaaccgggcatcaggcttacgtgtgatgtccggttaactcgtggtatgctgctgccgttcccttttttaatgacgcctccatcatgtttgtgaagctcttacgttccgttgcgattggattaattgtcggcgctattctgctggttgccatgcctagcctgcgcagccttaacccgctttccactccgcaatttgacagtaccgatgagacgcctgccagctataatctggcggttcgccgcgccgcgccagcggtggttaacgtttacaaccgtggtttgaacaccaactctcacaaccagcttgagatccgcaccctgggatccggtgtaatcatggatcaacgcggttatatcatcaccaataaacacgtcatcaacgacgccgatcagatcatcgtcgccttacaggatggacgtgtatttgaagcattgctggtgggatctgactctctaaccgatctggcggtacttaaaattaatgccactggcggtttacctaccattccaattaatgcacgtcgcgtaccgcacattggcgacgtagtactggcgatcggtaacccgtacaacctcgggcagaccattacccaggggattattagtgccacgggtcgaatcggtctgaacccgaccgggcggcaaaacttcctccaaaccgatgcttccattaaccacggtaactctggcggcgcgctggtgaacagcctgggcgaactgatgggcattaatacgctgagctttgataagagtaacgatggcgaaacgccggaaggtatcggctttgcgattcctttccagttagcaaccaaaattatggataagctgatccgcgatggtcgcgtgatccgcggctacattggtatcggcggacgtgagatcgcaccactgcacgcgcagggcggtggtatagatcaactgcaagggatcgtggttaatgaagtgagtcctgacggcccggcggcgaatgcgggtattcaggtcaacgatctgattattagcgtggataacaaaccggccatctctgctctggagacgatggatcaggtggcggaaattcgccctggtagcgtgatccctgtagtagtgatgcgtgatgataagcagttaacgctgcaggtcaccattcaggaatatccggcaaccaattaagtcgtgcgctcaaaacaaaaaaccggagtctgtgctccggttttttattatccgctaatcaattacttattaacgaactcttcgcccagggcgatatctttcttcagcgtatccagcataccttccagcgcgttctgttcaaatgcgctcagggtaccgatagatttacgctcttccacgccgtttttacccagcagcagcggttgagagaagaaacgggcgtactgaccgtcgccttcaacgtaggcacattcgacaacgccttgttcgccctgcagtgcacgaaccagagacagaccaaaacgtgcagctgcctggcccatagacagggttgcagacccgccaccggccttcgcttcaaccacttcagtacccgcgttctggatgcgtttggtcagatcagccacttcctgctcggtaaaactaacgccaggaacctgactcagcagcggcagaatggtaacaccagagtgaccgccaataaccggcacttcaacttcgcctggctgtttgcctttcagttccgcaacaaaggtgttggaacgaatgatatccagcgtggtaacgccgaacagtttgtttttgtcataaacaccggcttttttcagcacttcagcagcaattgcaactgtggtgttaaccgggttagtgataataccaatgcacgctttcgggcaggttttcgcaacttgctgtaccaggtttttcacgatgccggcgttaacgttaaacaggtcggaacgatccatacccggtttacgcgctacgcctgcagagataagaacgacatctgcgccttccagcgccggagtcgcatcttcaccagaaaaacctttgattttcacagcagtagggatatggctcagatcgacagccacaccgggagtcactggagcgatatcatacagagagagttcactaccactaggcagttgggtttttaacagtagtgcaagcgcctggccaataccgccagcagcgccgaggactgcgactttcatcctaaactccttattatattgataaactaagatatgttgctccgctgccgcgaccttaatccacaaaattgccgtttacaatgaccacatctcaagaatgtgtagtcacgcaagtttagcgtttatgcatttaattgccgtaatcaggaacctaacttacgtaattaacagtcgcttatgcattagcgcaacattccaacaggtggtgacaatataccctaccgttcagccaaaacaacatcaatttgataacaattaatttacttttaagcagaatttgcatgccgtgacgcaggcatgtttctcaataacgaaatttgataaaatcccgctctttcataacattatttcagccttcttcagggctgactgtttgcataaaaattcatctgtatgcacaataatgttgtatcaaccaccatatcgggtgacttatgcgaagcagcgctaagcaagaagaactagttaaagcatttaaagcattacttaaagaagagaaatttagctcccagggcgaaatcgtcgccgcgttgcaggagcaaggctttgacaatattaatcagtctaaagtcagccggatgttgaccaagtttggtgctgtacgtacacgcaatgccaaaatggaaatggtttactgcctgccagctgaactgggtgtaccaaccacctccagtccattgaagaatctggtgctggatatcgactacaacgatgcagttgtcgtgattcataccagccctggcgcggcgcagttaattgctcgcctgctggacagtctgggcaaagcagaaggtattctgggcaccatcgctggcgatgacaccatctttaccacccctgctaacggtttcacagtcaaagacctgtacgaagcgattttagagctgttcgaccaggagctttaatctctgccccgtcgtttctgacggcggggaaaatgttgcttatccctctcaaccccctgctttcccctgcgattaatttaacgaatagtgcgttttactgcgacatgtcattcacacaatgaatacataaggtaaaaaaagcacattatgcaaaattcattatctaattgaaaaaactagaattaacgataaataaccgtatttttaattcttttttgttattaaaattcacatttttaacacttagtatcaactgaaacagttagcgcggtattaattagctcaataattagtgtatacttgattttgtgatatgggtcacgaaacaaaggcccagctaaaagattatgtcgaggtaaaaatcatgaaaatcaaaaccactgttgctgcattaagcgtactttctgttctctctttcggtgcattcgctgccgactccattgatgctgcacaagcacaaaatcgtgaagcaatcgggaccgtatccgtaagtggtgtggcgtctagcccaatggatatgcgtgaaatgctgaacaaaaaagcggaagagaaaggcgcaacggcctaccagattactgaagctcgtagcggtgacacctggcacgctacggctgaactgtacaaataaaccctcatcgtcttgtccgacgatattgcccccggttcgggggcttttttttgcgttaatgacgaacattaaaacgcaaatgcccttccagctcttcctctgcctcatcaaacagcaatattaacgcgccaaaacggcgacgcgttttctctcccagatgaacaaattcaatctcaagtggtagcggcaggacatcgttcattaacacatcccatagactgtcgagatcgcgtaccttatctttcgccagaccaaaggtttggctaaagtcacgataaaaatcctcctgactctcaatctcatcaaaatcaaaggtataaatattcatctgttgccaccgtcacgtttcgcggcgagttctgccgtgcatcgctaagtatagccatgaaaaaaccgacgcttttggcgtcggttttgacttaactatcggtcaacgcatgttgatacttatggagcatccccgccagccgatttaccggttccgtcacctgcggtggcgcttgccagatgcgtagcttttcctggtagatttccagttcttccagcaactggccaaagtaccgacgacgtttatcatcgctacgggcagatatcacatggtctgctgtgcggcgcatttgtcggtgaaacgcgcttaaatcctcgttaaccgggatcggtgcatcacgcaggcgctggtgcgcgataatcatcgtcagcgccaggcgaaatttcggcaaatcccctgggaacttattcatcagcaaaaacagctgctgataaagtgccgggaggtggttctctttacgacgtgccacattggtagtcatcgcggaaacagcggcagaaacaaactgattaagcagtacacgtccggtcctgtcgcggcttttatcccgcaccagcaaaataacggtgaacgcgagcacacagccgacgatttgccctaatgcgctgtcgagaaactgactgaaatggaaagtcatcgggttatccagcacgataatatttatggtgctggccagtgcccccatgctgcccagtcgccgtttctgtacttctataccgaggaagaatcccagcactgccaggctaatgcacagcagcaacatgctctgttgggtattagggataatcaccaaaaagtagagcagccctaacggcagcgcggccagcgtcccgtagataaagtcgatcgccaccatgcgtggattcggcaaacgcattgccagactcgtcactaccgcaatcatcaccattgcaccactgccggaagtccagcccgtccacagccagaaaagcgtgcccagaatgcaggaaagtgtggttcgccagaagttacccattgcatgatgacgttcggcactctctacttttacttccggttcgccttgcaggatctcttcttcggtggcgttgatttttgtgttactgataacgccgcgcttgagaagctgataacgcgttgccgccgcgacccagctataaatggtgacaggcgtttcccgttccccggtccaggcgataactctccgcaggcgtttgagctgcttgtggacgtcctgcgcggtttctaccggcgtgtcaaaaaattcgcggaaagtatcagtgatcaattccgggcgcgtattctgaataagataagtttcgcaggattgggtaatcagcgtcaggcttagcgtattgatcgcttttaaacgtcgattggcccgcgcccagcgggaagattccatattcaggttgctgcgcatgccttgtagcgccgtggtgcgtcgcaccaggtcgccccaggctttatcgacaacttcaccatcgccatgcttgatacagagttgcattaattgatattgcgcgaccagcaaactttccagctctcgatccacttcttgtttgatgcttcgcggagaaaagagcaaatccgccataatcgcacacacaataccgataacgatctcgctacaacgttcgacggcaaactgcggcgtaagcaatggttccggctgaatggtgatcacaatgatcagcgcggtataaccggccagcccccacgcatagctgttttctattcgtaccaggctggatatccaggtacaaaaaccggcccagatacagcacaccagaatcatcaataatggtgcgcggatcatcgcaatgatgatcaccagtccggcaatacagccaataaatgtgccgatgatgcgcaaaaagccacgatagcgaatagcgccagaatacggttcacctcccgcagcaaaggccgtaccggcggcaacaatcgccgctgtcagtaccgcccagcgtggcgtttccagctggaagtgaaagccaacaaacagcgccagtacaatggcggtcgccagttttaccgcaaagcgaatatgttggttagcaatggagaaaatacccatcgtgattaaccaaactcacgcaggcgatgggccattttacggaagaagctatcctggctttcgtcgcgatcttgtttgccagtgaccaccactgtagcagtggtgcccgcaggccagatgttctcttgctggttgtcgagacgaatacgaaccggaacacgttgcgcaagacgcacccattcaaggttagagtctatagtcgccatccctttgtcgtcacgcgtgctgctggcgttggtgacccctgcggcaacactatcaacagtccctttcagcactttgttactgccaagcggcgtgatctctgcacgataccccggacgcaccccttccagcttagtttcttccatataggccagtacatagaaggagttctgtttcaccagcgcaaccgccgtacttcctcgagtaataaactcaccggtatagacgttgaggttggtcacccagccatctgctggcgcgcggatcaccgtgcgttcaagatccagttttgccagatcgcgggtcgcctgcgctttcgctaactgatgcagaaccgtttgtagtacgttgttggcctggtcgatctcttcgcgagacatcgcctgcacaccgagacggttacgacgtccggcctcctggcgtttctcctgtgccagtacctgataataagcaacatcggcttgcgcttcctcaagcgccttttgatagcgcggctggtcgatggtgaacagtatctgtccttttttcaccagctggttatcatgaacattcacctgggtaatgagtccagaaacgtccggcgcgatcgcaacgacgtcagcgctaaagcgcgcgtcacgcgtccagggggattcggtgtaatagacccaggcattaaaaattgcgatgaaggccagaatgactaatacgaccgtgatggccgtacgggagaattttcttattagtgttttcacttcaacctcaaacgaacagtcggcttatcaaataaaacaagcagcaatagagcgcggtgttgaacaacgccggatgccagacaaagtcgtagatacctgttggcacaagtacccggcgcaccagccagaaaatcgccagacttaaaagcaattcaaaaaatatcggtgggaaggacagcccaaacaccacgataacgggaaacagactcatgttgaccttggttgtaaagagagagcaggcgttattattttcagcatctgtcgccgcagagaagggcatggaaagccgggcgagagcaacattgctgtagattgatatttaatatattagcgtaactgttatgctgttatctatattatgtgatctaaatcacttttaagtcagagtgaataatggaacgactaaaacgcatgagcgtgtttgccaaagtagttgaatttggctcttttaccgccgccgccagacagctacagatgagcgttagctccatcagtcagacggtaagtaaactggaagatgagttgcaggtaaagctgttaaaccgtagcacacgcagcattggcctgaccgaagccggtagaatttactaccagggctgccgtcgtatgcttcatgaagtgcaggatgttcatgagcaactgtatgccttcaataacacccccatcgggacgctacgcattggctgttctagtactatggcacaaaatgttctcgccgggctgacagccaaaatgctgaaagaatacccaggtttgagcgtcaatctggttaccggaattccagcccccgacctgattgccgacggtctggatgtggtgatccgcgtcggcgcgttgcaggattccagcctgttttcccgccgtctgggcgcgatgccaatggtggtgtgcgccgcgaaaagctatctcacacaatacggcataccggaaaaacccgccgatttgagtagtcatagttggcttgaatacagcgtgcggcccgacaatgaatttgaactgatcgcaccggaagggatcagcactcgcctgatcccacaaggaagatttgtgactaatgatccgatgacgctggtgcgctggctgacggcgggtgccgggatcgcctacgtgccgctgatgtgggtgatcaacgagatcaatcgtggggagctggagatcctgctgccgcgttaccagagtgatccacgcccggtttatgcgttatataccgaaaaagataagctgccgctgaaggtacaggtcgtgatcaacagcctgacggattattttgttgaggtcggtaaattgtttcaggagatgcacgggcgcgggaaagagaagtaattcatattgtactgttacgttgtacaaacctgtgccaacgggttcccctcaccctaaccctcaccccaaaggggcgaggggaccgttcgtgcacgtagaaagattaattatccttctgaaaatagtgaaattattacgcagtaccgccaacagtcaggttatcgactttcaacgttggctggcccacgccaaccggcaaactttgcccttctttaccgcagacacccacgccgttatccagtttcaggtcgttgccaaccatgctaatctgctgcatggtttcgataccggaaccaatcaacgttgcgcctttcaccggcttcgttactttaccgttttcaatcagatatgcttcactagtggagaaaacgaatttgccggaggtgatatccacctgaccgccaccaaagttcggtgcatagataccgtactcaacggattcaataatttcctgcggggtgcttttacccggcagcatataggtgttggtcatacgcggcatgggcagatgggcgtaggattcacggcgaccgttgccagtcggcgtcatccccatcaaacgcgcgttgagtttatcctgcatgtagcctttcagaatgccgttctcaatcagcacgttgtactggcctggcgtaccttcgtcatcaatcgccacgctacctcggcgatcgaccatcgtgccatcatcaaccacggtacacagttcactagccaccagctccccgacctgtccactaaatacactagtgccacggcggttgaagtcgccttccagaccgtgaccaaccgcttcatgcaacagcacgcccggccaacctgcgccaagtactaccggcatggtgcccgctggtgcagcaacggcagaaagattgaccagcgccatacgcactgcttcttttgcccatgcatccgcacggacttcgccgtcgagatcggcaaggaagaattcataaccaaaacgaccgccgccgccactggcaccgcgttcgcgtttgccatcttcttcgacgagaacgctcacggaaagacgcaccagcggacggacatccgccgctagcgtgccgtcggtggccgcaaccaaaattaattcatagacaccactgaggctggcagtcacttcctgtacgcgcttgtccgcttcgcgggcaaccttatcgacgcgacgcaggatatccagcttctcttcacggctcatgctttgcagcggatctacgctggtatacaacgggctatgctctaccgcgcccagcgtctgtactttaccatcaccactatcacggacgatggtgcgcgccgcttgcgcactctgttccagcgccagcaggctgatttggtcagcgtaagcaaatccggttttttcaccgctgattgcacgcacaccaacgccctgatcgatgttgtaagaaccatctttaataatgcggtcttctaaaacccaggattcgtgatagctgctctgaaaatagagatcgccataatcaaggcgacgttcggccagttgaccgaggatcgcgaacaagtcctgatgtttcaggccgttcgccgctagcaattgttcacttaccaggttaagactcatcgtttttgctactcgttagttactgcagtagaggattttttacggctgccggatgcggcgtgaacgccctatccagcctacggttatgttccggtttgtaggcctgataagacgcacagcgtcgcatcaggcaacggctgtcggatgcggcgtaaacgccttatccgacctacggttatgttccgtttgtaggcctgataagacgcacagcgtcgcatcaggcaacggctgccggatgcggcgtaaacgccttatccgacctacggttatgttccgtttgtaggcctgataagacgcacagcgtcgcatcaggcaacggctgccggatgcggcgtgaacgccctatccgacctacggttatgttctggctcgttggcctttggcaacgattatcctatgagattggggcaattacgcgccctcgtcaaatcattgcgctttttctttacgcggttggcgcaacacttcgttgatttgcggatcgtccagcggaccgctaatgtgatagcgcaaaatggagactttgctccacagcggccccagcactttactggcggcaaacactgccgcgccaacaatggggttaaccgcaaaagccgcagccacgcccaccgtcgcagaaatctctggtgcgacaaccgcttccatattcaggtcgcgacgtaccagatttacgctccctttcatggcgatatccgcctccaggccatccaccagcgtgtcgtcggtgtgcataacgccgtctttaatccacgcggtgctgcgaatggagtcaaaatagaacccttcgccaaaagtgtctctgaaatcaaaacgcagcttacgcatcagggcatctacgctcaataagcgcagcaattgcccggcatgtccggtattgatttcggtaatttcgcctttacccagttgagtatgaatgatgccattcaacgtcgcttcatctggctgccagggtgctttgcgccagtgtaaatcgtaatccacattaaaactgctctggcgtatgggcgtcgtgacaccaaaaaattctgcggcggcatcaattttctgcccgcgcagttttcctttcaggctggtacgttcattccccggattattaacccattcaccatcggcagtaagccggctgaaaccagtatcaatcagtccattggtcagcgttaacgtatcgccagaaatggtgatatcactgtcaatgcgaccgaatttttgcccccagaaccagcactctgtgcatcgtatttgggcgtccggccagccacggaagttaatgcgctccgttgtcgggaaaggactactcggcgtactatcaccacgagttttcgccacgctcgggttgtaataaagatatttgatattcgccagccacggcgcgttattacgcatcgctagcgtggcgttgatttcacgcccttgcgcttcaaccagggtgccatttgccgtcggttggctaacaatactcaggttattccattgctgatttcccagactcaacataggcgtacgtaacgttatgtgttgtgggaaactcgctgcaccaccgacactctccgcagcgcctttctggaacagggccagccactcggcaccattcatcggcggcatattgagttcaacgccactttgttccggcaacggcgggagcgttttactgtctgccgcccaaatagcacgatcgagcgtcagcttttgaccgagcaaccagcggctattgaaatgattatccgcaccagcctgtccggttaattcaaagctgttgagattgccatcaaccttaacgtttaccgctagtggttcacccgcaggtttggctaacggactaggtaagtgactgctcacattctttagatcgccgttcagctctatgttataggtcgcaccagcatgataaggcagatcaatgcccactttaccatcccacgccacgctgccactcaatgcttcgttcaccgcttcaggcagaacgccggttttcgccggttgccagttaccgttgaggtttaccgctacctggtaggcttttgccccttctttggtggaaaaatccacgttcaacggctgattaaaccagcttgctgtcagtggttcactttgcagatcgctattgataaagctgaatttaccgctcaaatttttcagggtgctgtcgagtggtttgataaacagactgttattacgcagcgtcacttcacctttcgcggttaccagttcgccgttcagcgggatatcaagatgtaagcgagcattcacatcgccgtcgagctggagttcttgcagggtcgcacccagagaatctttcagcggtgtctcatcaaagtaagggccaacggctttacccggacctttaatgtcagcgtcaatcagcagtttttctttactgtagtcagggatcactgcggtaagattactcgcgcgcacgccgcccagattaacgccatcggttttcatccataaaccgtcgttaataaagtccagttcaatatcaaggttagttaatgcaggccagtccggctggaaggcaaacttcgcgttgcgcagcggcaccagcacttcaaactgaccttcgttgtgtttataggggaagagttgcggattgccaccataaaccagcgtcgcgttatccgcttcaccgccctgaatcgcgccacttaagtaatcaaccaggtctttacccatcaagttttccgggaaatagcgccaggcttgactaccatcatcggtactgatgccagccagaatacccagccagggttcatcgttagcaggttgcaggtaacgaaaaccgccgcgcgcatggacggctttggctttaacgtcaatattacgcccatccagctggaaacctttgttattgttcagccagcttatagttgcctggccgtcggcgatttctagtggcgcacggaataccgtttcgtaaggcatctttgcctgcttcatgctcgcggtaagcaaaccattttcaacgctgccggaaagcgtcccggagaagtgttccgcacccggtaataatttccattgcttccaggccagatcgctccagcttgcctgaaaacgggtcttgtctgccgcctgaagcgggatatccagcgccagagtgttaatcttgccgctcggttgtgtggagcgccaaacatcacccagtgcaggactaagtttcgcggccagcgggcgtatgccctccaggcctgccagctccagattactggcgcgaatccggagttcgtcactgcgtttattgtctttgccgccaacgtcctgttccggtatccaggccagcgtcaatgctccgctcggccagggtttgccgtccatcgtgatccgtgtatcgggaatagagaactgccagcccggattttcacgcgtaatatgcgcggtcagattatccacgctcagcgtatgcgtttgcttctcgcccaaccagctggcaccgccctgtttcagccagacgtcaccgccggttacatcgcctttgtcgatcgtcatccagccttcaagggagaactgtgccgtttccagcgcaatattgtcctgcatccatttaccgagccacggcttcaggtcgatgtcatccgcctggagccagacgcgaccattgcttaacaacccctcatcatcgcgcaaatccatgcgcacctgcatcacgccgtgctgtccggtaaggctggagaggcttaccaggccttccgcacggtgtcgacgtggatcgttcagccaggtgagttgtgggatcgccagctcggcgcgctgaccggatggcgtcaggaaactgacttcactgtcgcgaagatcgaaatggtcaaattgacgaagaaacagatcgctgatgtgactggcttccagactgtcatcactaccaccgctggtgataggagtgttggtgcgaaagcgcagctgccagaaagtgaggtcgcgaaactgccagcgcatatgtaacaggctctgccagacatccagcgccagagtaacgcgtttaacgctaaattcgccgccatcttttagttctgcacggatgtcgtgtgcttcaagcgtcgggccaaaattctgccagctggcactgagctgactggcttctaccggcatgccagtcgcggattctattttgttgaggatttccggacgccaggcgtcaagatgcggtaaagcaatacgcaggccgctaaccagcagggcagcgatcacaacgagcgcggctccagtaagcagtaaaatccccggcaatcgcctcacccgtcactccttgtctgctaaaaatgtgactcaaaaaccctttgccggatggcggcccagcatctgtttacatcattacgacgtcaaactgctcctggttatagagcggttcaatttgtactttaacctgtttgccaacgaaaatttccacttccgccaggctgtgactctcttcgcctttcaaggcttcagctactgccggagaagcatagaccaggaaacggtcggagtcgtaagcatggtggacacgaacaatctcgcgcatgatttcatagcataccgtttccacggttttcaccgttccgcgaccgtggcaggttgggcattcgttacacagtacgtgctcaatgctttcgcgggtgcgtttacgcgtcatctccaccagccccagcgcgctaaaaccattaacgctggttttcacccggtctttgctcaacgcctgctccaggctgtgcagcactcggcggcggtgatcttcattattcatatcgatgaaatcaataatgataatcccgcccagattacgcaaccgtaactggcgagcgatagcctgcgtcgcttcaatattggtattgaaaatggtgtcgtccagattgcgatgaccgacaaacgctccggtattgatgtccacggtggtcatcgcttcggtctggtcgataatgagataaccaccggatttcagttctactttgcgttccagcgctcgctggatttcgttttcgacatcaaagagatcgaaaatcggctggcgtcctgtgtaatgctccagcttgcttgtcatctcgggaatgtactcgctggtgaactcaagtaacgcttcgtaagtcaggcgactgtcaacgcgaatgcggtccagttcggcatcggcgaaatcacgcagaacacgctgcgccagcgccagttcgccgtacagctgataacgggtctgcgggcgttttttacgctccataactttggtccagacgcgtttcagataagcggcatcggaggccagttcagcctcgccaaccccttccgctgcggtacggatgataaacccgccctgctcgtcgcaatactctgcgaccacttttttcaggcgttcacgttcactttcgctttcaatacgttgggaaaccccaacgtgagaagcccctggcataaacaccagatagcgagaagggagcgtgatatcggtggtcaggcgcgcacctttagtgccaagcggatctttcaccacctgcaccatcagatcttgcccctgacgaaccagttcgctgatgtcgcgcaccgtgaattgcttttgttcttcacccgccacacattcggtgtgcggcatgatgtcggatgcatgaagaaacgcggctttatccagcccaatatctacaaaagccgcctgcatacccggaagtacacgacttacacgacccttgtagatattgcctactattccgcgtcgcgcctcacgttcaatatgaatttcctgcagaataccgccatcaatatacgccactcgcgtttcgctaggcgttacgtttactaacaattcagccgtcatgtttatcccttttctcacgcagtgcgttaaaattacttaataattcatacgtttcaaccagcggtaagccgactacggcgtgatagctgccatttatcttcctgacaaaacagccacccagcccctgaataccgtatgcacctgctttatctaacggttcatcgctggcgacatagcccgcgatgtcttcgtctgttaacgttctgaaagtcacatcggtgaccaccaggcaatcgagaatgtgctggctgtcggccaacgccactgctgtcatcacctgatgggtctgaccgcttaatttgcgcaacatctgcgccgcatgctctgcgtcgcgcggtttctccagcacttctccgttcaggataacgatagtatccgcacccagcaccgggagatccttcgccgtttgcgcgacacctgcccgtgctttctcgcgcgccagacgcacaacatactgctgcgcgctctcctgcggctgacgctgctcctcaatgcccgtaacaatacgttcaaaggtcacgccaagttgcgcaagtaactcctgacgacgcggagaaccggaagctaaatacagagaagtcatagaaacctttattgcactgcaaactgctgacggactttgcgcatcagcaagaaaatccacggccagagcaccccattgactacactactccagaacacttccggtctgaaagagacgttaatcactaaaaactctgcccagaaaacaataatatccaccaccaggctaagcaacatgacgaccagcgcctgctgccataatgcgaggttgcggaaaagctggtatttcagcgccaccaggtaagcaatgatgctcatcgccaatacgcgtacgccaagcgtgctgccgctgatcagatccagtatggcacccatcacaaaacctgtgcccacatttacgcgatgaggcaaggccaggatccaatacaacaagatgagtaacacccagtttggccggaaaacaatcaggttatccggccagggcatgatttgcagcaacagcgcaatgaggaaagagagccagattacccagcgtccctggctacgatagctcgccactattgccctcccggcgcacgttattgccctcccggcgcacgcgcaggcggttgagcaccactttgcggcggcgtagccctttgtggagagcgattagcagcaggctgtgtcggcgcagcaggcgcagtagctgcatttcctgtcgccggttgctgcggagtcggctgagcgatccccgttgccggttcaggtaactttggccccatcgcgtctgggctaggcaatacctgcggcatcatctgcatcagacgttcattagcaacacgatgcacctcttccggcgtcatcgggttagcgccgttacgatctgccccccacagcagcagcagataacgcaaacgttgcagccctgcagtcggacgcgcctgaatcacagtataagcgcgctgggtatcgagttttacggaagagacaaccgcgaccggatagccttccgggaaacgaccgcccagaccggaagtcaccagcacatcaccaacacgaatatccgtattcgccggcagatgctcaagctgcaaatcatccgtacaaccgttaccggctgcaattacgcggatatcgttgcgcagcacctggattggcagcgcgtgggtcgcatcacaaatcagcagcacgcgactggtcagtttagcgacggccaccacctgaccaacaacacctttgtcgctgatgaccggctggccttcataaacgccattaacgctacctttatcgataacaacttgatcgctataaggatcgttaaccgtggagataacctgagtcaccattttctgctcatcctgacgcagcggggaacccagcagctcgcgcagacgcgcgttctcctgtttgtattgtccaagcatcagcagttcactgtttttcagcaacagttcctgacgtaacgcccggttttcaagttctaattggtcacggctggccagcgtctggcttacgccatccagcaattcacgaggagcattggaaacaaagtagaaaggactgacggcggtatccatataagtacggatttgactgaacgtccccaggcggctgtcggcaataataatgccgagcgccaccagcaccgccagaataaggcgaatctgtaggctcgggccacggctaaaaattggcttcataagttatgcgtattctcgtatcagaccaggcagggtaaacagacacttcccctgcctgcatccgattactcttcgctgaacaggtcgccgccgtgcatgtcgatcatttccagcgctttgccgccaccgcgcgccacacaggtcagcgggtcttcagcaacaacgactggaatgccggtttcttccattaacaaacggtcaaggttacgcagcagtgcgccaccaccggtgagcaccatgccgcgctcggagatgtcggaagccagttccggcgggcactgttccagtgcaaccattaccgcgctcacaataccggtcagcggttcctgcagtgcttcgaggatttcattggagttcagggtaaaaccgcgtggaacaccttctgccaggttacggccacgaacttcgatttcacggacttcatcgcccggataagcgctaccgatttcgtgcttgatacgttctgcggtggcttcaccgatcagagaaccgtaattacgacgcacatagttgatgatagcttcgtcgaaacggtcaccaccaatgcgcacagaagaggagtaaaccacaccgttcaaggagataacagcaacttcagtggtaccaccaccgatatcaaccaccatagaaccggtcgcttcagaaaccggcaggccagcaccaattgcggcagccatcggttcttcaatcaggaagacttcacgggcaccagcgccctgcgcggattcacgaattgcgcggcgttcaacctgggtcgcgccaaccggcacacaaaccagaacgcgcgggcttggacgcataaagctgttgctgtgcacttgtttgatgaagtgctggagcattttttcagtcacgaagaagtcggcgataacgccgtctttcattgggcgaatggcagcaatattgcccggcgtacggcccagcatctgcttcgcgtcatgacctactgcagctacgcttttcggactaccggcacgatcctgacgaatggccaccacggaaggctcattcaatacgatgccttgtccttttacataaatgagggtattcgcagtacccaggtcaatggacaagtcattggaaaacatgccacgaaattttttcaacatactaagggataatcctgaaagctggggcggaaaagaaaatccgcttactttaccaaccacacgcagcagcgacaaggcgcaaaaatcatctgctacggtgaaaattagtgcagttcgtttcctttgttacaaatctctgcctgagtccagaaaggcttaatgcatcagcagcattcctcgcctgtttgcaaccgcgtaaggtcattcatctgcatatgtgctgcaacaatctggcgagcagacaagcacactcccatgagacgcagcgcgcattattctacgtgaaaacggattaaacggcaggttaaacgctgtatctttgactatattttttcacgttagtatcaagtggctgactggacgcgaaaaaatccccttgcccgcctgtaacaccgcgctgaatcagggtctgccactcgcttcggctacgcacgccggtggcgtaaacctgggtgctggtcccggagcaggcttccaccaggctttgaaccagcagctggttctccgttcgcttctcaatgtttctgaccagccccggatggagcttgagtaactcaacattaagttctttgatccaactggtacttaccagcgtcaaaccagcctggttgacggctacccgtacccctaaagcattcactaaacgaataacaggttgtaaacgactgatatgttgacctacatcggcctctgcaagttcaataattatgcgttttcgttgacttttttcacattgcattaacgtatcgcgcagccaacgctgaaaacgcgggcgaatcaggctctcaacggtaacctgaatcgccagattttcctctggccagtaacgcaatagtggaataagacggctgatttgcagacggtcatactcttcgcttaagccaaactgcaagaccatcggcatatgctccgcgctgctaacctcttcattaccatcgaagatgcggcacatgagttcgcgatgatgaacctgaccttcgcgagtaaccgccggtttttgataaaggcgcgggccgccgcgactgagcatttgctcgataagcgtacgccagcgaacattaccgcgtcctttttcaggcaagctgtcatcgtaaatagcccagctattgccgccctgcaatcccgcattacgcgtggcagactctgcatgttccattacctgctcggtatcctgaccactacgccaggcgcagataccaatgtggatcatatcgtcgcgatcgagcattttattgttcggcaaggtatcaacggctttgattaactgaccggcgatgctctctgcctcttttaacgtccggtgcggtaacagcgcagcaaaatcactgcggtggtaacgcgccagcagtgcgccagggtagcgcatcataaatgtgctcagcagattcgtcagagtgaagaactgttcttcaacctggctgtgcccccaggtatcgctcaacatattgaaatccggcagacgaatcatcatcacgatcccgtgggtacctactttctcctgatcttccagtaacgttgctaactgattatcgaaaaagagtcggttattgaggccggttttcacgtcctgggcggcataagagcggatcagcgtatcaagacggctgtgttgttcgcgtgcgttctgaatttcacgaagcagcgtatccagcgcactgctggttctgggcggccattcatagatggttcccaacacattagagccacgctcaccgtttaagatacgagtagcccgggtttccagcaattcttgcccggcaagttgccgttgtaaccagcgtaccgccaggaagagcataacaatgataaagccaatcgcccccgtgagcggcgcggtggtcatcaagctatggaaatagttgcccatcggatcctgataaaccagacgcaagctcatccccggatgctttatcaacggaacgctcagttcgcgaaacagatcgctggagccaactggacgataactaccatttctggccagggtataaacctgtttatcaccatggagcaggtctacacgaacgatatctgcgctcatcattaattcggtaatttgtggccttaatacgctgaagtcattgctcacaaggtgggtatcaatcgccgtcgccaccgcctgaacgcgatgactaaacttatactgaatggcgttgtagaaacttaggctacagcccagcaaagtcacaaaaattgttaacccggtgagcagcgtaacaaaggcgctaaatttcgtcgttaatctcatccttgtgttaactccgatagtgaggaagcgggcatactagcaaatcagatttatctcgcaatttattgcgcttcatcggctttgcttttccattagcgagtatagtcttcagaaattattttccaatccatcatgcacatgaggaccacttatgcaggcgttacttttagaacagcaggacggcaaaactctcgcaagtgtacagactctggacgaaagtcgcctgccggagggcgatgtcacggtcgatgttcactggagcagcctgaactataaagatgcgctggcgattaccggtaagggaaaaatcatccgtaattttccgatgattcctgggatcgattttgccggaactgtacgcaccagcgaagatccgcgttttcatgccggtcaggaggtgttactcactggctggggcgttggtgaaaaccactggggtgggctggcggagcaggcgcgagtgaaaggtgactggctggttgccatgccgcaagggctggacgcgcgtaaagcaatgattatcggtactgccggttttaccgccatgctgtgtgtgatggcgctggaagatgccggtgttcgcccgcaggacggggagattgtcgtgacgggtgccagtggtggcgtcggcagtaccgccgtggcgctgctgcataagttgggttatcaggtcgttgccgtttccggtcgcgaaagtacccatgaatatctgaaaagtttaggtgctagccgtgttctccctcgtgatgagtttgccgaatcccgtcctctggaaaaacaagtctgggctggggcaattgacaccgttggcgacaaagtgctggcaaaagtgctggcgcaaatgaattacggcggctgcgtggcggcctgtggtctggcgggtggttttactctgccaaccacggtcatgccatttattctgcgtaatgtccgtttgcaaggggtggatagtgtaatgacgccaccagaacgccgcgcacaagcctggcagcgactggtcgccgatttaccggaaagtttctatacccaggcggcaaaagagatatctctgagtgaggcaccgaactttgccgaggccatcattaataaccagatccagggtcgcacgctggtgaaggttaactaaccatttagcagggaataataagagagggaactcattttgaaatcattattcaatcggttaacgggaaaagcggttagccggacagctttcgtcgaacaccttggtcaggaagttatacaacatcatccaaactggaaagtcatgatttcgactgaccacaaattgatgcgcattgatactccactaaacagctattattgatacgcctccgtcgcctgttaggtttatgttgctttgcctgggcgacgctacgcttagccccttacttatttctggtaccatggggtgaataatctgattttgtttgactacaaattaatcactcgaacctatttaatgctgagcattgtcaatcggttaattttgcgtgctttagcattcacatctatccagacgatgcagtgaaaattgggtaatccccagcaaccgctgcgtaatgtcgtctatcttgtcgcgatcctggcatccctacattatttgtggtctgtgaagattatctcattgcagcccctcatcttcgcagggctggcttttcagcttttcaccttacgttataagaagttccgtcgatgatggcgctaatttcgtgaattgtgcggcttgttgcaaattacacggtgttgaaggttatttacatgttagctgttgattatcttccctgataagaccagtatttagctgccaattgctacgaaatcgttataatgtgcgacctcgtcctccctgacgcagtttttgcgctgcggaaaaggtgacattggcgcaacgaaggtatattttgttttttgccggaggatagcagcagatcgctgcacaatgtccgtcaagtctaacattgacactctggggcaaaatagaccggcgtcccggcctgctggaatttatcgctatgcatacagctgtcggggcatacgctttacagacggcggtgaaacgcctgtcacaatcacactaaacaaagagtacggaacccactcatggatattcgtaagattaaaaaactgatcgagctggttgaagaaagtggcatctccgaactggaaatttctgaaggcgaagagagtgtacgcattagccgtgcagctcctgccgcaagtttccctgtgatgcaacaagcttacgctgcaccaatgatgcagcagccagctcaatctaacgcagccgctccggcgaccgttccttccatggaagcgccagcagcagcggaaatcagtggtcacatcgtacgttccccgatggttggtactttctaccgcaccccaagcccggacgcaaaagcgttcatcgaagtgggtcagaaagtcaacgtgggcgataccctgtgcatcgttgaagccatgaaaatgatgaaccagatcgaagcggacaaatccggtaccgtgaaagcaattctggtcgaaagtggacaaccggtagaatttgacgagccgctggtcgtcatcgagtaacgaggcgaacatgctggataaaattgttattgccaaccgcggcgagattgcattgcgtattcttcgtgcctgtaaagaactgggcatcaagactgtcgctgtgcactccagcgcggatcgcgatctaaaacacgtattactggcagatgaaacggtctgtattggccctgctccgagtgtaaaaagttatctgaacatcccggcaatcatcagcgccgctgaaatcaccggcgcagtagcaatccatccgggttacggcttcctctccgagaacgccaactttgccgagcaggttgaacgctccggctttatcttcattggcccgaaagcagaaaccattcgcctgatgggcgacaaagtatccgcaatcgcggcgatgaaaaaagcgggcgtcccttgcgtaccgggttctgacggcccgctgggcgacgatatggataaaaaccgtgccattgctaaacgcattggttatccggtgattatcaaagcctccggcggcggcggcggtcgcggtatgcgcgtagtgcgcggcgacgctgaactggcacaatccatctccatgacccgtgcggaagcgaaagctgctttcagcaacgatatggtttacatggagaaatacctggaaaatcctcgccacgtcgagattcaggtactggctgacggtcagggcaacgctatctatctggcggaacgtgactgctccatgcaacgccgccaccagaaagtggtcgaagaagcgccagcaccgggcattaccccggaactgcgtcgctacatcggcgaacgttgcgctaaagcgtgtgttgatatcggctatcgcggtgcaggtactttcgagttcctgttcgaaaacggcgagttctatttcatcgaaatgaacacccgtattcaggtagaacacccggttacagaaatgatcaccggcgttgacctgatcaaagaacagctgcgtatcgctgccggtcaaccgctgagcatcaagcaagaagaagttcacgttcgcggccatgcggtggaatgtcgtatcaacgccgaagatccgaacaccttcctgccaagtccgggcaaaatcacccgtttccacgcacctggcggttttggcgtacgttgggagtctcatatctacgcgggctacaccgtaccgccgtactatgacagtatgatcggtaagctgatttgctacggtgaaaaccgtgacgtggcgattgcccgcatgaagaatgcgctgcaggagctgatcatcgacggtatcaaaaccaacgttgatctgcagatccgcatcatgaatgacgagaacttccagcatggtggcactaacatccactatctggagaaaaaactcggtcttcaggaaaaataagactgctaaagcgtcaaaaggccggattttccggccttttttattactggggatcgacaacccccataaggtacaatccccgctttcttcacccatcagggacaaaaaatggacactcgttttgttcaggcccataaagaggcgcgctgggcgctggggctgacccttttgtatctggcagtttggttagtagccgcttacttatctggcgttgcccccggttttaccggctttccgcgctggtttgagatggcctgcatcctgacgccgctgctgtttattggactgtgctgggcgatggtgaaatttatctatcgcgatatcccactggaggatgacgatgcagcttgaagtaattctaccgctggtcgcctatctggtggtggtgttcggtatcagcgtttatgcgatgcgtaaacggagcaccggcaccttccttaatgagtatttcctcggcagccgctctatgggcggtattgtgctggcgatgacgctcaccgcgacctatatcagtgccagtagctttatcggcgggccaggagctgcttataaatacgggctgggctgggtattgctggcgatgattcagcttcctgcagtctggcttagtctcggtattctcggcaagaagtttgcgattcttgcgcgccgctacaatgcagtgacgctgaacgatatgctgtttgcccgctaccagagtcgtcttctggtgtggctggcgagtttgagtttgctggttgcgttcgttggtgcgatgaccgtgcagtttatcggcggtgcgcgcctgctggaaaccgcggcgggtattccttatgaaaccgggctgctgatttttggtatcagcattgcgttatataccgcctttggtggctttcgcgccagcgtgctgaacgacaccatgcaagggcttgtgatgctgattggcaccgttgtgctgcttattggcgtagtacatgccgctggcggcttaagtaacgcagtacagaccttgcaaaccatcgatccgcaactggttacgccacaaggcgctgacgatattctgagccctgcctttatgacgagcttctgggtactggtgtgttttggcgtgattggcctgccgcatactgcggtgcgctgtatctcttataaagacagcaaagccgtacatcgggggatcatcatcggtacgattgtggtcgcaattctgatgttcggtatgcacctggccggagcgttaggtcgggcggtgatccccgatctcaccgtaccggacctggtgatcccaacgttaatggtaaaagtgctgccaccgtttgctgccgggatcttcctggctgcaccgatggctgcgatcatgagcacaattaacgcccaactgctgcaaagttccgctacgatcattaaagatctctatctgaatatccgtccggatcaaatgcaaaacgagacgcgtctgaagcggatgagcgcggtaattacgttagttctcggcgcgttgctgctgcttgccgcctggaagccgccagaaatgatcatctggctgaatttgttggccttcggtgggctggaagccgttttcctgtggccgctggtgctgggtctttactgggaacgcgccaacgccaaaggcgcgctaagtgcgatgatcgttggcggcgtgctgtatgccgtactcgcgacgctgaatattcagtacctgggcttccaccctatcgtgcccagcttactactaagtttgctggctttcctggtcggaaaccgtttcggtacatccgtcccgcaagctaccgttttgactactgataaataaagagttttgccatgccttggatccaactgaaactgaacaccaccggcgcgaacgcggaagatcttagcgatgcgctgatggaagcgggtgccgtttctatcacttttcaggatacccacgatacgccagtatttgaaccgctgccgggcgaaacgcgcctgtggggcgacaccgatgtgattggtctgttcgacgctgaaaccgatatgaacgacgtggtggcgattctggaaaaccatccgctgctcggcgcaggcttcgcgcataaaatcgaacaactagaagataaagactgggagcgcgaatggatggataatttccacccgatgcgctttggtgaacgactgtggatctgccctagctggcgtgatgtgccggacgaaaacgccgtcaacgtgatgttagatccagggctggcgtttggtacgggtacccatccaaccacctctctgtgcctgcaatggctcgacagcctcgatttaaccggtaaaacagtcatcgactttggctgtggttccggcattctggcgatcgcggcgctgaaactgggtgcagcaaaagccattggtattgatatcgatccgcaggcgattcaggccagccgcgataacgccgaacgtaatggcgtttctgaccgtctggaactctacttaccgaaagatcagccagaagaaatgaaagccgacgtggtggtcgctaacatccttgcaggcccattacgtgaactggcaccgttaatcagcgtcctgccggttagtggcggtttgctgggcctttccggtattctggcaagccaggcagagagcgtttgtgaagcttatgccgatagcttcgcactggacccggtcgtggaaaaagaagagtggtgccgtattaccggtcgtaagaattaaccttcgcatcgccgtagggtgacgcggggcgaagtgcgagcaagctcacaaaaggcacgtaaatttgccgattatttacgcaaatttgcgtgccaaaattttcattcataaagaaaaattgagaacttactcaaatttctttgagtgtaaattttagtcactattttctaatatgatgatttttatgagtaattatcgcaccacgctcattttaaatgcaattctttgatccatctcagaggattggtcaaagtttggcctttcatctcgtgcaaaaaatgcgtaatatacgccgccttgcagtcacagtatggtcatttcttaactcatgcgcatcggacaatatcagctcagaaatcgcctgatcgcagcgcccatggctggcattacagacagaccttttcggacgttgtgctacgagatgggagccggattgacagtatccgagatgatgtcttctaacccacaggtttgggaaagcgacaaatctcgtttacggatggtgcacattgatgaacccggtattcgcaccgtgcaaattgctggtagcgatccgaaagaaatggcagatgcagcacgtattaacgtggaaagcggtgcccagattattgatatcaatatgggttgcccggctaaaaaagtgaatcgcaagctcgcaggtagtgccctcttgcagtacccggatgtcgttaaaagcatccttaccgaggtcgtcaatgcagtggacgttcctgttaccctgaagattcgcaccggctgggcaccggaacaccgtaactgcgaagagattgcccaactggctgaagactgtggcattcaggctctgaccattcatggccgtacacgcgcctgtttgttcaatggagaagctgagtacgacagtattcgggcagttaagcagaaagtttccattccggttatcgcgaatggcgacattactgacccgcttaaagccagagctgtgctcgactatacaggggcggatgccctgatgataggccgcgcagctcagggaagaccctggatctttcgggaaatccagcattatctggacactggggagttgctgcccccgctgcctttggcagaggttaagcgcttgctttgcgcgcacgttcgggaactgcatgacttttatggtccggcaaaagggtaccgaattgcacgtaaacacgtttcctggtatctccaggaacacgctccaaatgaccagtttcggcgcacattcaacgccattgaggatgccagcgaacagctggaggcgttggaggcatacttcgaaaattttgcgtaaacagaaataaagagctgacagaactatgttcgaacaacgcgtaaattctgacgtactgaccgtttctaccgttaactctcaggatcaggtaacccaaaaacccctgcgtgacagcgttaaacaggcactgaagaactattttgctcaactgaatggtcaggatgtgaatgacctctatgagctggtactggctgaagtagaacagcccctgttggacatggtgatgcaatacacccgtggtaaccagacccgtgctgcgctgatgatgggcatcaaccgtggtacgctgcgtaaaaaattgaaaaaatacggcatgaactaattcaggttagctaaatgcttgattaaaaaggcgctactcggcatggggaagcgccttttttataggtgtcacaaagggagtgaccatgagaacaggatgtgaaccgacccggtttggtaatgaagctaagaccattattcacggtgatgcgcttgccgaacttaaaaagatccccgccgaaagtgtcgatctgatctttgccgacccaccatataacatcggtaaaaattttgatggtctgatcgaagcctggaaagaagatctgtttatcgactggctgtttgaagtgattgcagagtgccaccgcgttctgaaaaagcagggcagcatgtacatcatgaacagtacggaaaacatgccctttatcgatctccagtgccgcaagctttttaccatcaaaagtcgcatcgtctggagttatgacagttctggagtgcaggcgaaaaaacactacggctccatgtacgaacccatcctgatgatggtgaaagacgcaaagaactacacattcaacggtgatgctattctggtagaagccaaaaccggaagccagcgcgcgttgatcgattatcgcaaaaatcctccacagccttacaatcatcaaaaagtaccgggtaacgtttgggattttccgcgcgtgcgttatttgatggatgaatatgaaaaccacccgacgcaaaaaccggaagccttactgaaacgcattattctcgcctcttccaacccaggcgatatcgttctcgacccgtttgctggtagctttactaccggtgccgtagccatcgccagcggacgaaaattcattggtattgagatcaacagcgagtacatcaaaatggggcttcgacggctggatgtcgcgagccattactctgcggaagaactggcgaaagtgaaaaaaagaaagaccggcaacctgagtaaacgaagccggttaagcgaagttgaccccgatctcattacaaagtaaaggatgtgtaagcctggttttcagattattcatttcgtgtatatttcctgccagacttggttaaacatgcacaggctcaggtaatgattcgcaagtattggtggctcgtcgttttcgctgtcttcgtttttctgtttgatactttactgatgcagtggattgaactgctggcaacagaaacagacaaatgccgcaatatgaacagtgttaatccactaaaactggttaactgtgacgaactgaattttcaggacagaatgtgaatttacatgacacttaattcattcgtttgatgaattaatttcgttatgttttcatctggcatgaacattcttaatacgttatcgaccagagcgggggcttgtttataaagatcataacccgccatattcattaaccagttttgaacaattccgctgaaggcaccatcaataataatcatcacaacatctaaatcgaggttatttgctacacaaccttgttgctgacacgcctgcaatacttcgcggagagtctgcggattaaagcccatcttttcgcgtatcactccctcggccagcatctcatcattaaattcacatttgtgatataagattttcagcaacgcctgctggcggggaattttggcaatatattgcaagccgacaatcaatttttcacgcaattgttgaaacgggtcatgctctaatccagccgtcaagtgttcctggattaactcccgcaaactaggctgttgcaaccacatctcattaaacagttgagtcttgttttcgaagtgccagtagatagcgccacgcgtaacgttagcggcgtcggcaatgtcgttgagcgtcgtcttgcttacgccatgctgcgcaaactgggcgatggcagtttcaatcagttcttgccgggtcttcagagcttcggctttggttctttttgccatgattaattattcaggaaataaatatattcgacacagagtgagaaaatagcgaaggttaatctatcacctaatgtgtatttatacgagaggctaatattgagttgctataaatcgttaaataaataatatatattatttacctaagatacattcactacatcaatatatatttcaatttacgaggttttaattctgcctctttcaacccgcgtcaaaataaaacagtagaatattaatctttttttgtgtttatgtgccttgagatgcctgtattcataactattccttacatcgacgaatgataatttgtaggatagcgaactgtatttttctttctgcgagttaacgcgttgcctttttgggtaaataacgcgcttttggttttttgaggaatagtaatgacgaaacatgccaggtttttcctcctgccctcctttattctgatctccgcggctttaatcgccggttgtaacgataagggagaagagaaagctcacgtcggtgaaccgcaggttaccgttcatattgtaaaaacggccccgttagaagttaagactgaattaccaggccgcaccaatgcttatcgtatagccgaagttcgcccacaggttagcgggatcgtactgaatcgcaatttcactgaaggcagcgatgtgcaagcaggccagtccctgtaccagatcgatcccgcgacctatcaggcaaattatgacagcgcgaaaggcgaactggcgaaaagtgaagccgccgccgccatcgcgcatttgacggtaaaacgttacgttccgctcgtgggtacgaaatacatcagccagcaggagtacgaccaggccattgctgatgctcgtcaggccgatgccgccgtgattgccgcaaaagccacagtcgaaagcgctcgcatcaatcttgcttataccaaagtcactgcgccaattagcggacgtatcggcaaaagcactgtgaccgaaggcgctcttgtcactaatgggcaaacgactgaactggcgactgtccagcagctcgatcctatctacgttgatgtgacccaatccagcaacgattttatgaggctgaagcaatccgtagagcaaggaaatttgcataaggaaaacgccaccagcaacgtagagttggtcatggaaaacggtcaaacctatcccctgaaaggtacgctgcaattctccgatgtgaccgttgatgaaagcaccggctccataaccctacgtgctgtcttccctaacccgcaacatacgcttttgccgggtatgtttgtgcgtgcacggattgatgaaggcgtccaacctgacgccattcttatcccgcaacaaggcgttagccgcacaccgcgtggtgatgcaaccgtgctgattgttaacgataaaagtcaggttgaagcgcgccctgtcgttgccagtcaggcgattggcgataaatggttgattagtgaaggactgaaatctggcgatcaagtcattgtcagcggcctgcaaaaagcgcgtccgggagagcaggttaaagccactaccgatacccccgcagatactgcaagcaagtaaggtaatctgacatggcaaacttttttattcgacgaccgatatttgcatgggtgctggccattattctgatgatggcgggcgcactggcgatcctacaattgcccgtcgctcagtatccaacaattgcaccgcctgcggtttctgttagtgcaaactatccgggcgctgatgcgcagaccgtgcaggatacggtgacgcaggttatcgaacagaatatgaacggtatcgataacctgatgtatatgtcctccaccagcgattccgccggtagcgtgacaattacccttaccttccagtccgggaccgatcctgatatcgcgcaagtgcaggtgcagaacaaactccagctcgccacgccgttgctgccgcaggaggttcagcagcaggggatcagtgttgaaaagtccagtagcagctatttgatggtggcgggctttgtctctgataacccaggcaccacacaggacgatatcagcgactatgtggcctctaacgttaaagatacgcttagccgtctgaatggcgtcggtgacgtacagcttttcggcgcacagtatgcgatgcgtatctggctggatgccgatctgctaaacaaatataaactgacaccggttgatgtgattaaccagttgaaggtacagaacgatcagatcgctgccggacagttgggcggaacgccagcgttaccagggcaacaattgaacgccagcattattgctcagacgcggtttaaaaatccggaagaattcggcaaagtgaccctgcgcgtaaacagtgacggcagcgtggtacgcctgaaagatgtcgcacgggttgaacttggcggtgaaaactataacgttatcgctcgtatcaacggaaaaccggcggcgggcctggggattaagctggcaaccggcgcgaatgctctcgataccgcgaaagccattaaggcaaaactggcggaattacagccattcttcccgcagggaatgaaggttctctacccttatgacaccacgccattcgtccagctttctattcacgaagtggtaaaaacgctgttcgaagccattatgctggtgttcctggtgatgtatctgttcttgcagaatatgcgagcaacgctgatccccgccattgcggtacccgtggtgttgttagggacgtttgccatcctcgccgcttttggttactccatcaacacactaacgatgttcgggatggtgcttgccatcgggctgctcgtcgatgatgcgatagtggtggtggagaacgtcgagcgcgtgatgatggaggataagctcccgccaaaagaagcgacggaaaaaagcatgagccaaattcagggcgcactggtgggtatcgcgatggtgctgagtgcggtatttattccgatggcattcttcggcggttctactggggcaatttatcgccagttctctatcaccatcgttagcgcaatggcgctttctgttctggtggcattgattcttacccctgcgttatgtgcaacgctgcttaaacccgtctctgctgagcatcacgaaaataagggcggtttcttcggttggtttaataccaccttcgatcatagcgttaaccactacaccaacagcgtcggcaaaatcctcggatccacaggacgatatttactgatctatgcgctgattgttgcaggaatggtggtgttgtttttacgtcttccgtcttccttcttacctgaagaggatcagggtgtctttctgaccatgattcagttacccgctggcgcgacgcaagagcggacgcaaaaagtgttggatcaagttacggattactatctgaagaacgagaaagcgaacgttgaaagtgtctttacggttaacggctttagcttcagcggccaggcacaaaacgccggtatggccttcgtcagtctgaaaccgtgggaagagcgtaatggtgacgaaaacagtgcggaagcggtaatccatcgtgccaaaatggaattgggcaagatccgcgacggttttgtcattccattcaatatgccagccattgttgaactgggcacggcaacgggtttcgactttgagttaattgatcaggctgggctgggtcacgatgccctaacccaggcccgtaaccagttgcttggtatggcggcgcaacatcctgccagcttagtcagcgtgcgccctaatggcctggaagacaccgcgcagtttaaactggaagttgaccaggaaaaggcgcaggcattaggtgttagtctttctgacatcaatcagaccattagtacggcgctgggtgggacttacgttaacgacttcatcgaccgtggccgcgtgaaaaagttgtatgttcaggcggatgccaaattccgtatgctgccagaagatgtcgataaactttatgtccgcagcgccaacggcgaaatggtgccattcagcgcctttaccactagtcattgggtgtatggctctccgcgactggaacgctacaacggtctgccgagtatggagattcagggggaagccgcgccaggaaccagttccggcgatgccatggcgttgatggaaaaccttgcgagtaaattacctgcgggcattggttatgactggacgggtatgagctatcaggaacgcttaagcggaaaccaggctcccgctctggtagcaatttcctttgtggttgttttcctgtgccttgctgcactctatgaaagctggagtattcctgtcagcgttatgttggtagtgccgttagggattgtcggcgtgctgctggcggcgacactctttaatcaaaaaaatgacgtctactttatggtgggcttgctaacgacaattggcttgagcgccaaaaacgctattttgatcgttgagttcgctaaagatctcatggagaaagagggtaaaggtgttgttgaagcgacactgatggcagtacgtatgcgtctgcgtcctatcctgatgacctctctcgcctttattctcggcgtattaccgctagctatcagtaacggtgccggcagtggcgcgcagaacgctgtgggtatcggggtaatgggaggaatggtctctgcaacgttgctggcaatcttcttcgtaccggtgttctttgtggtgatccgccgttgctttaaaggataaatcagaaacataaaggcgctttcgggtgcctttattatttccagtgaaacccataaaaattaataagatattcttctgctcactctttaaaagctttctatagttcccgctcccttcactatttttacaattcacataatttgtcattattcattccgcaagatttataacctccggtgataaaatggcattcagctcgttaataagagagttaacttattaagcgttagcgtttattactgaggtaacaccatgaaaagattaattcctgtggcattgctcaccgcattgctggcgggctgtgctcacgatagcccctgcgttccggtttatgacgatcagggtcgtctggttcacaccaatacctgtatgaaaggcacgactcaggataactgggaaacggctggggctattgccggcggggcagctgctgttgctggcctgacgatggggatcatcgctctaagcaaataactgaacagggcgcggagttccgcgctctttttaacgatacagtatctctccataagataaaatattgctatattctgctgggtaattccctgctgatttagcatgttacatcgcgttatttcgctgctttcgaaataacgcatcaatttaattttcacacttcccaccagaaatatactcacgctaacaatcattattctgcttagtaaaacacgcgtaaatattttgcgccaaaatgtggcgcatgtttcattttcgcaccattgcggggcgctgtttttattatttcctgtctacactcagcttattgcgacgcgaaatcgtgcgcaaaagctggcactacttttgcttataagaggatggccacagacaggtaaaagacgtttcccaaacgtcctataacgataattttcgcctcacaggaagcattatgaaaaagatgatgatagccacactggctgccgccagcgtgctgcttgccgttgcaaatcaggcgctgctggcgcgacgcttgatgccgttcagaaaaaaggttttgtgcaatgcgggatcagtgatggattacctgggttctcttatgccgatgctgacggtaagtttagtggtattgatgttgatatttgtcgtggtgttgccgctgctgtatttggtgacgacacgaaagtgaaatataccccgctcactgcaaaagaacgcttcaccgctttacagagtggggaggtggatttgctctcccgtaatacgacctggactagttctcgcgatgccgggatgggaatggcatttaccggcgtcacttattacgacggcattggcttcctgacgcacgataaagcggggctaaaaagcgcgaaagaactggatggcgctaccgtctgtattcaggcgggtactgataccgaactcaacgtcgccgactacttcaaggcaaacaatatgaagtacacaccggtgactttcgatcgctctgacgaaagtgcgaaggcactggaatctggtcgctgcgatacgctggccagcgatcaaagtcaactgtatgccctgcgcatcaaattaagcaacccagctgaatggattgtcttaccggaagttatcagtaaagaaccgcttggtccggtagttcgtcgtggcgatgatgaatggttcagcattgtacgctggacgcttttcgccatgctgaatgctgaagagatgggcatcaattcccagaacgtcgatgaaaaagcggctaatccagcaacgcctgatatggcacatctgctgggtaaagaaggcgattacggcaaggatctgaagctggataataaatgggcctataacatcatcaaacaggtgggtaactacagcgaaatttttgagcgtaacgtaggtagtgaaagcccgctgaaaattaaacgtgggcaaaataatctctggaataacggcggtattcagtacgcaccgcccgtgcgttaagtcggtgtgaggtaacgagcgtcgctacggcggcgctctcttcagcgttatgctttccgaggtttctatgtctcatcgccgcagtaccgttaaaggcagtctctcttttgccaaccctacggttcgcgcctggttattccagatccttgccgttgttgctgttgtcggcattgttggttggttatttcacaacactgtaacgaatctcaataatcgtggcattactagtggttttgcctttctggatcgcggcgctggcttcggtattgtccagcatttgatcgattaccagcagggcgacacctacggacgcgtttttattgtcggcttactcaatacgctactggtttctgcattgtgtattgtgttcgcttctgttttgggcttctttatcggtctggcgagacttagcgataactggctgctacgaaagctttccacaatttatattgagatcttccgtaatattcccccgctgctgcaaatcttcttctggtactttgccgtgttgcgcaatttgcccggaccacgccaggctgtgagcgcgtttgatctggcctttttgagcaatcgtgggctttatattccgagtccgcagctgggagacggatttattgcgtttatcctggctgttgttatggctatagtcctttctgttgggctattccgctttaataaaacataccagataaagaccggacaactgcgccgcacctggccgatcgccgcagtgttgatcattggtttgcctttactggcgcaatggctttttggcgcagcactacactgggatgtcccagccctacgaggctttaacttccgcggcgggatggttttaattcctgaactggcagccttaacgctggcacttagcgtttatacatctgcatttatcgccgagattatccgcgctgggatccaggcagtgccttatggtcaacatgaagcggctcggagtctgggattacccaacccggttacgctacgccaggtcattattccccaggcattgcgggtgattattccaccgttaaccagccagtatctcaacatcgtcaaaaactcctctcttgccgccgctattggctatcccgatatggttagcctgtttgccggcaccgtgctgaatcagacggggcaagccatcgagacgatagccatgaccatgagcgtctatctgattatcagcctgactatcagcctgctgatgaatatctataaccgccgcatcgcgatcgttgaacgctaaggagtcatgatgacaaaagtattgctgtctcatcccccgcgcccggcgagccataacagtagccgcgcgatggtgtgggtgcgaaaaaatctgttctccagctggagcaatagcctgctgactattggctgcatatggttgatgtgggaactgatcccaccgttgctgaactgggcatttttgcaggctaactgggttggcagtacgcgtgccgactgcacaaaagccggtgcctgttgggtcttcatccacgaacgatttggtcagtttatgtatgggctttacccacacgaccaacgctggcgaattaacctcgcattactgattgggcttgtgagcatcgcaccaatgttctggaaaatactcccgcatcgcggtcgctatattgcggcctgggcggtgatttacccactgattgtctggtggctgatgtatggcggtttttttgctcttgagcgggttgaaacccggcaatggggcgggctgacgctaactttaattattgcaagtgttgggattgcgggggcgctaccgtgggggatcttactggcgttaggtcgccgctcccatatgccgattgtgcgtatcttaagcgtcatttttatcgaattctggcgcggcgtgccgctgattaccgttctgtttatgtctagcgtcatgctgccgttgtttatggcagaaggcaccagtatcgacaaattgatccgcgcgctggttggcgtgatcctgtttcagagtgcatatgttgcggaagtcgtgcgaggtggattacaggcgctgcctaaagggcaatatgaagcggcagagagcctggcgttgggttactggaaaactcaggggctggttattctgccacaggcgttgaagctggtaattcctgggctggtaaataccatcatcgcactcttcaaagataccagcctggtgatcattatcgggttgttcgatcttttcagtagcgttcagcaggcaaccgttgatcccgcctggttgggtatgagcacggaagggtatgttttcgccgcgctgatctactggatcttctgtttcagcatgagccgctatagccagtatctggaaaaacgttttaacaccgggcgtacaccgcattgaggacactatgagccaaattttactgcaacctgctaacgcgatgattacgctggaaaacgtcaataaatggtatggacaattccatgttttgaaaaatataaatttaaccgtgcaaccgggagaacggatcgttctgtgtggccctagtggttccggtaaaagcacaaccattcgttgtattaatcatctggaagaacatcaacagggacggatcgtggtagatggcatcgaacttaatgaagatatccgcaatattgagcgcgtcaggcaggaagtgggaatggtctttcagcatttcaatctcttccctcatctgaccgttttacagaactgtaccctggcaccgatttgggtacgcaagatgcctaagaaagaggctgaagatctggcggtgcattacctagagcgggtgagaattgccgaacatgcgcataagtttcccggacagattagtggtggtcagcagcaacgcgttgccattgcgcgtagcctgtgtatgaagccgaaaattatgttgtttgatgagccaacgagcgcgctcgatcctgagatggtgaaagaggtgctggatacgatgattgggctggcgcagagcggtatgacaatgttgtgtgtaacacatgagatggggtttgcacgaaccgtcgctgaccgggtaatttttatggatcgtggggaaatagtggagcaagctgcacctgatgaattttttgcgcatcctaaaagtgagcgtacgagggcatttttaagccaggtaatccattaattgaatgttagttcgaaaagcaaaaaggccatcctttcggatggcctttcgcttgatttgatgtctggcagtttatggcgggcgtcctgcccgccaccctccgggccgttgcttcgcaacgttcaaatccgctcccggcggatttgtcctactcgggagagtgttcaccgacaaacaacagataaaacaaaaggcccagtcttccgactgagccttttgttttatttgatgtctggcagttccctactctcgcatggggagaccccacactaccatcggcgctacggcgtttcacttctgagttcggcatggggtcaggtgggaccaccgcgctactgccgccagacaaattcttttctaatctgccgaactttaacctaaaaagtggtgctgatacccagagtcgaactggggacctcacccttaccaagggtgcgctctaccaactgagccatatcagcacgctaaatttgatgcctggcagttccctactctcgcatggggagaccccacactaccatcggcgctacggcgtttcacttctgagttcggcatggggtcaggtgggaccaccgcgctacggccgccaggcaaattctgttttatcagaccgcttctgcgttctgatttaatctgtatcaggctgaaaatcttctctcatccgccaaaacagcttcggcgttgtaaggttaagcctcacggttcattagtaccggttagctcaacgcatcgctgcgcttacacacccggcctatcaacgtcgtcgtcttcaacgttccttcaggacccttaaagggtcagggagaactcatctcggggcaagtttcgtgcttagatgctttcagcacttatctcttccgcatttagctaccgggcagtgccattggcatgacaacccgaacaccagtgatgcgtccactccggtcctctcgtactaggagcagcccccctcagttctccagcgcccacggcagatagggaccgaactgtctcacgacgttctaaacccagctcgcgtaccactttaaatggcgaacagccatacccttgggacctacttcagccccaggatgtgatgagccgacatcgaggtgccaaacaccgccgtcgatatgaactcttgggcggtatcagcctgttatccccggagtaccttttatccgttgagcgatggcccttccattcagaaccaccggatcactatgacctgctttcgcacctgctcgcgccgtcacgctcgcagtcaagctggcttatgccattgcactaacctcctgatgtccgaccaggattagccaaccttcgtgctcctccgttactctttaggaggagaccgccccagtcaaactacccaccagacactgtccgcaacccggattacgggtcaacgttagaacatcaaacattaaagggtggtatttcaaggtcggctccatgcagactggcgtccacacttcaaagcctcccacctatcctacacatcaaggctcaatgttcagtgtcaagctatagtaaaggttcacggggtctttccgtcttgccgcgggtacactgcatcttcacagcgagttcaatttcactgagtctcgggtggagacagcctggccatcattacgccattcgtgcaggtcggaacttacccgacaaggaatttcgctaccttaggaccgttatagttacggccgccgtttaccggggcttcgatcaagagcttcgcttgcgctaaccccatcaattaaccttccggcaccgggcaggcgtcacaccgtatacgtccactttcgtgtttgcacagtgctgtgtttttaataaacagttgcagccagctggtatcttcgactgatttcagctccacgagcaagtcgcttcacctacatatcagcgtgccttctcccgaagttacggcaccattttgcctagttccttcacccgagttctctcaagcgccttggtattctctacctgaccacctgtgtcggtttggggtacgatttgatgttacctgatgcttagaggcttttcctggaagcagggcatttgttgcttcagcaccgtagtgcctcgtcatcacgcctcagccttgattttccggatttgcctggaaaaccagcctacacgcttaaaccgggacaaccgtcgcccggccaacatagccttctccgtccccccttcgcagtaacaccaagtacaggaatattaacctgtttcccatcgactacgcctttcggcctcgccttaggggtcgactcaccctgccccgattaacgttggacaggaacccttggtcttccggcgagcgggcttttcacccgctttatcgttacttatgtcagcattcgcacttctgatacctccagcatgcctcacagcacaccttcgcaggcttacagaacgctcccctacccaacaacgcataagcgtcgctgccgcagcttcggtgcatggtttagccccgttacatcttccgcgcaggccgactcgaccagtgagctattacgctttctttaaatgatggctgcttctaagccaacatcctggctgtctgggccttcccacatcgtttcccacttaaccatgactttgggaccttagctggcggtctgggttgtttccctcttcacgacggacgttagcacccgccgtgtgtctcccgtgataacattctccggtattcgcagtttgcatcgggttggtaagtcgggatgacccccttgccgaaacagtgctctacccccggagatgaattcacgaggcgctacctaaatagctttcggggagaaccagctatctcccggtttgattggcctttcacccccagccacaagtcatccgctaatttttcaacattagtcggttcggtcctccagttagtgttacccaaccttcaacctgcccatggctagatcaccgggtttcgggtctataccctgcaacttaacgcccagttaagactcggtttcccttcggctcccctattcggttaaccttgctacagaatataagtcgctgacccattatacaaaaggtacgcagtcacacgcctaagcgtgctcccactgcttgtacgtacacggtttcaggttctttttcactcccctcgccggggttcttttcgcctttccctcacggtactggttcactatcggtcagtcaggagtatttagccttggaggatggtccccccatattcagacaggataccacgtgtcccgccctactcatcgagctcacagcatgtgcatttttgtgtacggggctgtcaccctgtatcgcgcgcctttccagacgcttccactaacacacacactgattcaggctctgggctgctccccgttcgctcgccgctactgggggaatctcggttgatttcttttcctcggggtacttagatgtttcagttcccccggttcgcctcattaacctatggattcagttaatgatagtgtgtcgaaacacactgggtttccccattcggaaatcgccggttataacggttcatatcaccttaccgacgcttatcgcagattagcacgtccttcatcgcctctgactgccagggcatccaccgtgtacgcttagtcgcttaacctcacaacccgaagatgtttcacttcagagttgcgaaaatttgagagactcacgaacaactttcgttgttcagtgtttcaattttcagcttgatccagatttttaaagagcaaaacttcgcagtgaacctttgcaggtacactctgaagtattttttatttaatcactacagagatggtggagctatgcgggatcgaaccgcagacctcctgcgtgcaaagcaggcgctctcccagctgagctatagccccataacatgtagttaaaacctcttcaaatttgccgtgcaaatttggtaggcctgagtggacttgaaccaccgacctcacccttatcaggggtgcgctctaaccacctgagctacaagcctgtagaggttttactgctcattttcatcagacaatctgtgtgagcactgcaaagtacgcttctttaaggtaaggaggtgatccaaccgcaggttcccctacggttaccttgttacgacttcaccccagtcatgaatcacaaagtggtaagcgccctcccgaaggttaagctacctacttcttttgcaacccactcccatggtgtgacgggcggtgtgtacaaggcccgggaacgtattcaccgtggcattctgatccacgattactagcgattccgacttcatggagtcgagttgcagactccaatccggactacgacgcactttatgaggtccgcttgctctcgcgaggtcgcttctctttgtatgcgccattgtagcacgtgtgtagccctggtcgtaagggccatgatgacttgacgtcatccccaccttcctccagtttatcactggcagtctcctttgagttcccggccggaccgctggcaacaaaggataagggttgcgctcgttgcgggacttaacccaacatttcacaacacgagctgacgacagccatgcagcacctgtctcacggttcccgaaggcacattctcatctctgaaaacttccgtggatgtcaagaccaggtaaggttcttcgcgttgcatcgaattaaaccacatgctccaccgcttgtgcgggcccccgtcaattcatttgagttttaaccttgcggccgtactccccaggcggtcgacttaacgcgttagctccggaagccacgcctcaagggcacaacctccaagtcgacatcgtttacggcgtggactaccagggtatctaatcctgtttgctccccacgctttcgcacctgagcgtcagtcttcgtccagggggccgccttcgccaccggtattcctccagatctctacgcatttcaccgctacacctggaattctacccccctctacgagactcaagcttgccagtatcagatgcagttcccaggttgagcccggggatttcacatctgacttaacaaaccgcctgcgtgcgctttacgcccagtaattccgattaacgcttgcaccctccgtattaccgcggctgctggcacggagttagccggtgcttcttctgcgggtaacgtcaatgagcaaaggtattaactttactcccttcctccccgctgaaagtactttacaacccgaaggccttcttcatacacgcggcatggctgcatcaggcttgcgcccattgtgcaatattccccactgctgcctcccgtaggagtctggaccgtgtctcagttccagtgtggctggtcatcctctcagaccagctagggatcgtcgccttggtgagccgttaccccaccaacaagctaatcccatctgggcacatccgatgacaagaggcccgagggtccccctctttggtcttgcgacgttatgcggtattagctaccgtttccagtagttatccccctccatcaggcagtttcccagacattactcacccgtccgccactcgtcagcgaaacagcaagctgtttcctgttaccgttcgacttgcatgtgttaggcctgccgccagcgttcaatctgagccatgatcaaactcttcaatttaaaagtttgatgctcaaagaattaaacttcgtaatgaattacgtgttcactcttgagacttggtattcatttttcgtcttgcgacgttaagaatccgtatcttcgagtgcccacacagattgtctgataaattgttaaagagcagttgcgacgcggctttcagctcactgtcgcgaggtggcgtatattacgctttcctctttcagagtcaaccctgaatttcaggatttttttctcttcgttgttccgaccatcctgtgaagtgtttcacgttgtcgtctcaacggaggcgcattatagggatcccaattttttgcacaagtatttttttgatctttttttctgtttgttgttttttcaccctttttgctgcaatcgcacacaaaacggtgcttttttgcatactaaaagacttgcacaaggccaataatgcccccaaagtcattagtaaatcatttattgctgaggtaagtatgtctgatgttttacgcccataccgcgatctttttccacaaatcggtcagcgcgtaatgatcgacgatagcagtgtcgtgattggtgacgttcgtctggctgatgatgtggggatctggccgctcgttgtgattcgtggagatgtacattatgtacagatcggagcacgcaccaatatccaggatggcagtatgttgcatgtcactcataaatccagctacaacccagatggcaacccattaaccattggcgaagatgtcactgttggtcacaaggtgatgctccacggctgcaccattggcaatcgagttttggttgggatgggcagtattttacttgatggcgcaatagtagaagatgatgtgatgattggtgcgggtagtctggtcccacaaaataaacggctggagagcggatatctgtatctcggtagccccgtcaaacagatccgcccgttaagtgatgaagagaaggctgggttacgctattccgcgaataattacgtgaaatggaaggacgaatatctggatcagggtaaccagacccagccttgatcatcttcactttgttcctgaattaagttttccgcttcttcttccaggtcccagcgatgctgacgaaaactcgctaaccactgttctggcgtatctccagtaaagcgatacgccagactctcgccagagatcgcgcatgtcagttgcataccattcacgagagcgggaaaacatacacattttttattctcgtcccactcttccctgtccggaaactggatggcctgattcacgcggacaattcctcctgcaattgctttataactggttctacgtcaggcagaacaccgtgccagagaagaaaggcatgagccgcctgtgccaccagcattcctaaaccatcagcattacgcttactgcctcgctgctcacaccatgccagaaaaggagtttttcctttctgatagaacatgtcatagcaataaatgcctggatgaatgaggctactcgggatcgccggaatatcaccactgatgccactggatgttgcattaataatgagatcaaactcatgaccttccagttcgtccatactcaacgcctgaatactgccagtgtgcgcaaacaatttagccaactcttccgcgcgggataccgtccgattagttattgtcaccgcacagtccagggaaaggagtggcagtagtacgccgcgagatgctccaccagcgccgataagcagaatacgtaaaccagggcggataaaagacagacgttccagatcgcttaacaagcctacaccatcggtattgtcacccagcaggcgtccatcttctaaccgcatgagggtattaacagcaccagccaacgctgcccgttcagtaagctcatccgctctggcaaaagcctcttctttaaaaggcaccgtcacattcgcacctttaccaccagcactaaagaaagcgttcagtgtgttgatgaaatcattgatgggtgccaacacgcgcccatagggatgttcaatattcagttgctgagcaaattgctgatgaatgaatgggcttttgctgtgggctatcggattaccaaaaacagcataggtttccattatgttacccctgtcgaaacagttcacccgtcagggcatcgcggatttcactaggatttaaacgcccccccgtttcaccaggcacaaccgggaacgccgcgccaaattgtgcgcgaacttcgtctactgttcgacaaggtggcaatccactcaagttggcactggtagaaaccagcggtttaccataagcctggcacaaagcaaccaccaacggatggtcggtgactcgtacagcaaggctatcaaagcggcccgtcaaccagcgcggtgttgtcgcaggcgcgggaaagacaaaggtgacaggacctggccagcgggaaaaaatggtttcacgctgcacgtcagtcaacatggtgtcatcaatatagggtttaagctgctcgtaatttgctgcgattaaaatcagccccttatcaaccggacgctgttttaactccaacagtcgcatcactgctgtttcgctatcaggatcgcacccaacaccgaaaacggcttccgttggataggcgatgacacgttcttcattgagaacatctatcgcagctgcgatagcgtctctttgcaggttattattcacgttattattccgcgctaaccggctttccacattgtttactggcacaaaagtgttttacaccctgcgcggttttcttttcgatgagtagcggataatgacactcagggcattctccagctatgggtttgaagttaatggcaaattgacactccgggtagcgatcacaagagtgaaatgttttgccataacgggagcggcgctggaccagatggcccgtccgacattgggggcatgtaattgctgtttcgtccggtttatcgataagttcggtatgttcgcattcagggtagttaatgcaaccaataaacataccaaagcgtccctggcgtaataccagatttgcgccacatgcagggcaaacctgcccctccagaactttgacgatatgtccatccgcactagatttcagaggacggacgtagtcacacgccggatactgactgcatccaagaaacggaccgtgtttcccggatcgaataaccagttcagccccgcactttgggcaggactcattattacgcaccgtgaacagtgcacttttcgccataacaacttatgctgaattaaagaaatgattaatgcagcataccttcattcacttcaaagagtaattcttccatttgctggtacgcattttcgcagcccggaatattgaacaacaccatcaggatcacccatttcagatcatccagttcgaactctgcgttatccagcgcgagcactcgctctatcaccatttcacgagtttcaaggttgagcacctgaatctgctcaaggaaaagcagaaacccacggcagctggcatccagtcgttcacactcttccggtgtataaatacgcatggagagaggatcgctggccagttgcatcggttctgccaacccttcctgataatcagcaagtttttccagccatagcagggcattgtagatatcttctcgctcaaaacctgcgtcggtaagatcctgttcaagtttgtcttgatccacacgcaactcagcttctgtgtgaatataggtttcaaacaaatacattagtacgtcgaacatggcatgccctcctcaatcggacatagccgccgggtacagctgcgatccatcctgctaactccagttcgagtagttgagtaactacctctggcacaggttggccggcacgttcagcgacgacgtcaacaggtgttacctcatctcctacgttagccaggagctcaggaaatggcaatgccacgtcttgctgatctggactataaaaactattttcaggggcgtctggcaaccagtgcaatccaaattgcaagttttccagaatttcttccggttccgtcacaagaatcgcaccttgttttattaaccagtgaggcccttcgcttcccggattccctattggacctggcaaggcaaaaacttctcgcccctgctcaagcgcacaacgtgctgtcaccaggctaccactacgcaaagccgcttccaccaccagtacacctttacttagaccactgataatgcgatttcttcgtgggaaattgtaagcaaggggtggaacatcgaggggaaattcgctgacgagagcgcccccctgttcaagcagactggcagccagtcgggcatgacggcggggatgaatggtattaagtccattccccaatacagcaatgctgacgccatttacctgtaaggctgctttatgcgctacaccatcgattccacgcgccagtccactcgtaattgtcactccacgcgtcgccagagtttcgcaaaataatcgtccccatcgctcgccataccaactatgcgcccgactccccactacggcaagctgaaaactatgcagcgcgtgcagttctccttcaacaaacagtgcgccggggtaatctgtcgtcgccagaagttgaggaggataaaattcgctgtccgcaggaattaaatgatggttgggttgctccaaccaacaaagactgctttcgatactctttcgtggaaaactaagaaagcgttgtgcctgccgcaatgtaagccctgtttgctgcaatacaaccgcatcaatatggctctgttttgccacccagtgagcgatacggaccatatcatcgccgtacaagctgctgatactcattaaacgcagccaaatttctgtatcgaccatccttatctccctgccataagcagccttagcaatctttgcgattggtcagtgatgctgtcaatcagagggggatttgtctagaatagaagaaataatctttctaactcctgaacacatctctggagatttatgagcgttttgcaagtgttacatattccggacgagcggcttcgcaaagttgctaaaccggtagaagaagtgaatgcagaaattcagcgtatcgtcgatgatatgttcgagacgatgtacgcagaagaaggtattggcctggcggcaacccaggttgatatccatcaacgtatcattgttattgatgttagcgaaaaccgtgacgaacggctagtgttaatcaatccagagcttttagaaaaaagcggcgaaacaggcattgaagaaggttgcctgagcatccctgaacaacgtgctttagtgccgcgcgcagagaaagttaaaattcgcgcccttgaccgcgacggtaaaccatttgaactggaagcagacggtctgttagccatctgtattcagcatgagatggatcacctggtcggcaaactgtttatggattatctgagtccgctgaaacaacaacgtattcgtcagaaagttgaaaaactggatcgtctgaaagcccgggcttaaggataagaactaacgtgagtgaaagtctacgtattatttttgcgggtacacctgactttgcagcgcgtcatctcgacgcgctgttgtcttctggtcataacgtcgttggcgtgttcacccagccagaccgaccggcaggacgcggtaaaaaactgatgcccagcccggttaaagttctggctgaggaaaaaggtctgcccgtttttcaacctgtttccctgcgtccacaagaaaaccagcaactggtcgccgaactgcaggctgatgttatggtcgtcgtcgcctatggtttaattctgccgaaagcagtgctggagatgccgcgtcttggctgtatcaacgttcatggtagtctgctgccacgctggcgcggtgctgcaccaatccaacgcagtctatgggcgggtgatgcagaaactggtgtgaccattatgcaaatggatgtcggtttagacaccggtgatatgctctataagctctcctgcccgattactgcagaagataccagtggtacgctgtacgacaagctggcagagcttggcccacaagggcttatcaccacgttgaaacaactggcagacggcacggcgaaaccagaagttcaggacgaaactcttgtcacttacgccgagaagttgagtaaagaagaagcgcgtattgactggagtcttagcgcagcacagcttgaacgctgcattcgcgctttcaatccatggccaatgagctggctggaaattgaaggacagccggttaaagtctggaaagcaagcgtcattgatacggcaaccaacgctgcaccaggaacgatccttgaagccaacaaacaaggcattcaggttgcgactggtgatggcatcctgaacctgctcagcttacaacctgcgggtaagaaagcgatgagcgcgcaagacctcctgaactctcgtcgggaatggtttgttccgggcaaccgtctggtctgatagtccactcttctaagcccggtcttgccgggcgtttttatacttatgaaaaaacaacgtaatttacgtagcatggcggcccaggccgttgaacaagtcgtcgagcaagggcaaagtttaagcaacattctgccaccgctccagcaaaaagtttccgataaagacaaagcacttcttcaagagttgtgctttggcgtactgcgtacgcttagccagttagactggctgattaataagttaatggcccgtccgatgaccggcaaacagcggaccgtgcattacctgattatggttggtttgtatcaactgctttatacccgcattccacctcatgctgcgctggctgaaacggttgaaggcgctatcgcaattaagcgtccgcaacttaaagggttgataaacggtgtattacgccagttccagcgtcagcaagaagagttattagccgagtttaatgccagtgatgcacgttatctgcatccttcctggttgctgaagcgtctgcaaaaagcgtatccagagcagtggcaatccatcgtcgaagccaataaccagcgtccgccaatgtggctgcgtattaatcgtacgcatcattcccgcgacagctggcttgcattgctggatgaagcaggaatgaaaggtttcccgcatgcggattaccctgatgctgtacgtctggaaacacctgcacctgttcatgcgctacctggttttgaagacggatgggttaccgttcaggatgcaagtgcacaaggttgcatgacctggcttgcgccacaaaacggtgaacacattttggatctttgtgccgcccccggcggtaaaacaacgcatatccttgaggtggcaccagaagcgcaggttgttgcggttgatatcgacgaacagcgcctctctcgggtttacgacaatttaaaacgccttggtatgaaggcgaccgtgaaacaaggtgatggccgttacccttctcaatggtgtggcgagcaacagtttgatcgcattttattagatgcgccttgtagtgcaaccggtgtgattcgtcgccatccagatattaaatggttacgtcgcgatcgcgatatcccggaactcgcgcaattgcagtctgaaattctcgacgccatttggccgcatttaaaaaccggtggaactctggtctatgccacctgtagcgtgttaccggaagagaatagcctgcagattaaagcctttttgcaacgtaccgctgatgccgaactttgcgaaacaggaacaccagagcaaccgggtaaacaaaatctacctggtgccgaagagggcgacggcttcttttacgctaagctaatcaaaaagtgatgagataacgggtcgcgactgatgaaaattatcattctgggtgccggccaggttggcggcacactggcggaaaacctggttggcgagaacaacgatattactgttgtcgataccaacggtgagcgtctgcggaccttacaggataaatttgacctgcgggtcgtgcaggggcatggctctcatccacgcgtattgcgggaggcaggtgccgacgacgccgatatgctggttgctgtaaccagtagtgatgaaaccaatatggttgcctgccaggtagcctacagtcttttcaacacccctaatcgcatcgctcgtatccgcagtccagactacgtgcgcgatgccgataagctatttcatagtgatgctgtgccgattgatcatctgatcgcaccagagcagttggttatcgataatatttaccgactgattgagtatcccggcgcattgcaggtggtgaacttcgctgagggtaaagtcagcctggctgtggttaaagcctattatggcggcccgctgattggtaatgcacttagcaccatgcgcgaacatatgccacatatcgatactcgtgtggcagcaattttccgccacgatcgccccattcgtccgcaaggtagcaccattgttgaagctggtgatgaagtgttctttattgccgctagtcagcatatccgcgcggtgatgagtgaattacagcgactggaaaaaccgtataagcggatcatgctggttggtggcggtaatatcggtgcagggctggcgcgtcgtctggaaaaagattacagcgttaaactcatcgaacgtaatcagcagcgcgctgccgaactggcggaaaagttacagaatacgatcgtcttttttggtgatgcgagcgatcaagaactactggccgaagaacatatcgatcaagttgatctgtttattgccgtcaccaacgatgacgaggccaatatcatgtccgccatgcttgccaaacgtatgggtgcgaaaaaggtgatggtattgatccagcgtcgcgcttatgtggatctggttcaggggagcgttatcgatattgcgattagtccacaacaagcaactatttctgcgttgcttagccatgtgcgaaaagcagatattgttggtgtttccagtttgcgccgcggcgtagcagaagctattgaagccgttgctcacggtgatgaaagcaccagtcgcgttgtcggcagagtcattgacgaaatcaagctaccgccaggaacgattattggagcggtggtacgtggaaacgacgtgatgattgccaatgacaatctgcgcattgagcaaggcgatcacgtaattatgttcctcacagataaaaagtttattaccgacgtcgaaagactcttccagccaagccctttcttcttgtaattaataaggcgtctaatgacgccttattatttccctttgattatcaaggattaattaaattcattcctggcaggaaaatggcttaacatttgttagacttatggttgtcggcttcatagggagaataacatgagcattattaaagaatttcgcgaatttgcgatgcgcgggaacgtggtggatttggcggtgggtgtcattatcggtgcggcattcgggaagattgtctctagtctggttgccgatatcatcatgcctcctctgggcttattaattggcgggatcgattttaaacagtttgctgtcacgctacgcgatgcgcagggggatatccctgctgttgtgatgcattacggtgtcttcattcaaaacgtctttgattttctgattgtggcctttgccatctttatggcgattaagctaatcaacaaactgaatcggaaaaaagaagaaccagcagccgcacctgcaccaactaaagaagaagtattactgacagaaattcgtgatttgctgaaagagcagaataaccgctcttaacaagcgccactaagcagaagaccagtggtaaaaaagtgatttactttcttgccactggcctcccagttcccccgattgccatgttttccttttcgcatgtaactgcctttccccttcttatttttctctacgcgctgtcggaataagggatcatgtagtaatgcttctatcgcattatcctttatctgccctttagtatgctgatatcgactcataaaaactccagttggttatttaacggcgcgagtgtaatcctgccagtgcaaaaaatcaacaaccactcttaacgccactcgccccttgttcaagagcttcaagaatgctacaataaacactgctatgagcagtcccacaacaggcatcgttaaggcgttgcaaggaacgctgcatactctgcaactcggctatccgtgcttcgacttcctgcaatctttcctgcacaatgcctttactctcctgacaggtatggtgttcaggatcgatgcggatgctcagcaactcgcggatgctctccagactgaaacctagttgtctggcatggcggataaatttcaatcgctggagatcgctttcggtatataggcgaaacccaccttcagtacgcacttcatgctccatcatctgctgtttttcgtaataacgaatcgtgtcgggtgttacttccgccatttttgccagctcaccaatgcgatacatacatactccattagttatcgttgattttgtccaacaacttgtcagcataatcgccgcgtaaaaaatcggtactcaatccagcttgtcgcagcttcaattccagtaaactcaatcgacggctaacctcttgatattgcggatcatcgtgacggatacctttgagaatatccagaagctgaattgcttctctccgttgctcaagttctggcggtaagcaaccggcattcttcagcaagcgataccccgcacgtaattccggtggcacgtgagaatcatcatccagtatcaatggttcgccgctacctgccaggttatcaaactcacctttcgcttgcgcttctgctatatggcgctctgcccactggtcaagtaaccacataaatactccaggggatgaacaaaaagagtacagctattgtagataagtggggatactacgggtataaaaaaacccgccggggcgggtttttttacgttgcttcagattactctgcagcagcttctgctttctcactacgatcaaccagctcgatgtaagccatcggcgcgttgtcgcctgcacggaagccacacttcagaatacgagtgtaaccaccggcacggctcgcgaaacgcgggcccagttcgttaaacagttttgccacgatctcgttatcacgagtacgggtgaatgccagacgacgattagcaacgctatcagtcttggcaagagtaatcagcggctcaactacgcggcgcagctctttcgctttaggcagagtcgtcttgatgatttcatgacgaaccagactacctgccatattgcggaacatagcctggcgatggctgctgttgcggttcagttgacgaccactcttacgatggcgcatgaccttatccttctcagtaaaaccttaacctgtgattcggttactcgtcagcgatgcttgccggtggccagttttccaggcgcatgcccagagacagtccacgggaagccagcacgtctttaatctcagtaagagattttttaccaaggttaggcgttttaaggagctcaacctcggtacgctgtaccagatcaccgatatagtggatagcttctgctttaaggcagttagcagagcggacagtcaattccagatcgtcaacagggcgcagcaggatcggatcgaactctggtttctcttctttcacttcaggctgacgtacatcacgtaagtcaacgaaagcttccagttgttcagccagaatggttgccgcacgacgaatcgcctcttcaggatcgattgtgccgttggtttccatttcgatgaccagcttgtccaggtcggtacgctgttctacacgcgctgcttcaacattgtaggcaatacgctccacagggctgtagcatgcgtcgaccagcagacggccgattgggcgctcatcttcttcgctatgaattcgggtagaagccggcacataaccacgaccgcgctgaactttgatacgcatgctaatagacgcgttctcatcggtcaggtggcagatcacgtgctgcggcttgacgatttcgacatcaccgtcgtgggtgatatcggctgcagtcacagggccaatgccagatttattcaaggtaagaataacttcatctttgccctgaactctcaccgccagccctttcaggttgagcaggatttccaggatatcttcctgaacgccttctttggtgctgtactcatgtagtacaccatcaatctcaacctcggtcaccgcgcaacccggcatgctactgagcagaatacggcgcagtgcgttacccagagtatggccaaagccacgctctaaaggctcaagggtcaccttggcgtgcgtgctactcacttgctcgatatcaaccaggcgcggttttagaaactctgtcacagaaccctgcattgtgtcctctctttggtactaagctttacttggagtaaagctcgacgatcaggtgttcgttaatgtccgcagacagatcagaacgctccggcttacgcttaaacgtaccttccatcttgccagcatcaacttccagccaggttggcttttcacgctgctcagccagctccagagcggctttcacgcgagactgcttcttcgctttctcacgaatgcttacaacgtcattcggactaacctgataagaagcgatgttaacaacacgaccgtttaccataattgctttatggctaaccagctgacgtgcttctgcacgagtggcaccgaagcccatacggtatacaacgttgtccagacgaccttccagcagagccaacaggttttcaccggtgttgcctttcagacgtgctgcttctttgtagtagttacggaactgacgctccagcacaccatagatacggcgaactttttgcttttcacgcaactgcacaccatagtcagacagacgcggtttacgcgcaccgtgctggccaggagcttgttcaattttacacttggtatcgatcgcgcgaacgccagacttaaggaataagtcggtgccctcacgacggctcagcttgagcttaggacccaaatatcttgccattttctttctccaacaaacctggaaaacgaggcgttatacgcgacgttttttcggcggacgacaaccgttatgagggatcggagtcacatcagtaatgttagtgatgcggaaacctgcggcgttcagagcacgaatagtagattcgcggcctggacccggacctttaaccataacttccagattcttgatgccgtattctttcacggcgtcagcgcaacgctctgctgcaacctgagctgcaaacggagtggatttgcgagaaccacggaaaccggaaccaccggctgttgcccaacccaacgcgttaccctgacgatcagtgatagtcacgatggtgttgttgaaagaagcatggatatgagccacgccgtcagagacttgttttcttacacgtttacgtgcacgaattggtgcctttgccattattcaatcaccccgattatttcttgatcggtttgcgcggacccttacgggtacgtgcgttggtcttggtacgctgaccgcgaaccgggagaccacgacgatgacgcaaaccgcgatagcaaccaagatccatcaggcgcttgatgctcatgctgatttcacggcgcagatcaccttcaacgacaaatttggcaacttcgtcacgcagcgtgtcgatttgtccttcagacagctcactgatcttaacatcttcagcgatacccgctgcagccaggatggctttagaacgggtcttgccgacgccataaatgctagttaatgcgattacggcatgcttatgatcaggaatgttaatgcctgctatacgggccactatgcactcctactatttaatatgtacgttccatgctgaaaagcccgttttcaggatactcaaatggaaacgcacagacatacaaaagattggctggctaatctagccagctcaacccaactttgcaagaaaaatatgcgaaaaaatcagccttggcgctgtttatgcttcggctcggcactgcaaatcacacggatgacaccatcacgcttaacgattttgcagttacggcataatttcttgacggaagcacgaactttcatttttactctccgtaacttctcgggcgaccaattatcggccgtagcctttcaggttcgccttcttcaatgcagactcatactgactggacatcatcagagtttgcacttgagccataaagtccataatcacgacaacaacgataagcagactggtcccaccgaagtagaacggtactttcattgcatcacgcatgaactccgggatcaggcagataaaggtaatatacagcgcaccaaccagggtcaggcgggtcattactttatcgatatacttcgccgtttgctctcccggacgaattcctggtacaaatgcaccggacttcttcaggttatctgctgtttcacgcgggttgaaaaccaacgccgtgtagaagaaacagaagaagatgattgcagacgcatagagtaacacataaagcggttgcccaggctgcaaatacaggctaattgttgtcagccagttccaaccagtaccgcccccgaaccaactcgcgatggtcgccgggaacagaataatactggaagcgaagattgccgggattacccccgccatattcactttcagcggtaaatgtgtgctctgtgcagcatagacacgacgaccttgctgacgtttcgcgtagtttaccacaatgcggcgttgaccacgctcaacaaatacaacaaagaacgtcactgcaaatactaatactgcaaccaacagcaacacgaggaagtgcaggtcgccttgacgcgcttgctcgatagtatgggcaatggctggcgggagtcccgcgacaataccggcgaagataatgatactaataccgttgccgatacctcgttcagtaatctgttcgcccaaccacatcaggaacatggttcctgtgaccagacttacaacagcggtgaagtagaatgcaaagcccgggttaatcaccaggccttgcataccaggcatattcggcagaccggtagcaataccgatgctctggaatattgccagcaccagagtaccgtagcgggtgtactggctgatcttacgacgaccagactccccttctttcttaatttctgccaacgttgggtgaaccaccgtcagcagctggataatgatgctcgcgctaatatacggcatgatccccagagcaaagatagaagcacggctgagagcaccaccagagaacatgttaaacatctcaatgatggtgcctcgctgttgctcaagcagtttggcaagtacagcggcatcaataccagggatcggaataaaagagccaatacggaacacaatcagcgcaccgataacaaacagcagtctgcgtttcagctcgcctaagccacctttggcactttgaaaatctaatcccggttgtttagccatctgctacttattcctcgattttaccgccagcagcttcgatagcagcacgagcgcctttagtaacacgcaggccacgaacagttaccggagtcgttacttcgccagccaggatcactttcgcgaactcgatctggataccgataatgttagccgctttcagcgtgttcaggtctactacaccgccttctactttagccaggtcagacagacgaatttcggctgtaatcgctgctttacgagaagtgaagccgaatttcggcagacgacggtacagaggcatctgaccaccctcgaaaccgcgacgtacgccaccgccagaacgagacttctgacctttgtgaccacgaccaccggttttaccgaggccagaaccgataccacgacccaggcgtttacccgcctttttggagccttcggccggagacagagtatttaaacgcatctcttactcctcaactttaaccatgaaggaaaccgcgttgatcataccgcgaatagcaggagtatcctcgcgctctacggtgtgaccaatacgacgcagacccaggccaagcagcgttgccttgtgtttcggcagacgaccgattgcactgcgggtttgagtaattttaatagtctttgccatggtttatttccccagaatttcttcaacggatttaccacgcttggcagcgaccatttctggagaattcatattttccaggccatcaatagttgcacgaaccacgttgatcgggttggtggaaccataggctttagccagaacgttatgaaccccagcgacttccagaacggcgcgcattgcaccaccggcgatgataccggtaccttcggaagccggctgcatgaatacgcgagaacccgtgtgaacacctttaacagggtgttgcagagtgccgttattcagcgcgacgttaatcatattgcgacgggctttttccatcgctttctggatcgctgctggaacttcacgcgctttaccgtaaccaaaaccaacgcgaccgttaccatcgccaactacagtcagagctgtgaaggagaaaatacgaccacctttaacggttttagatacgcggtttaccgcgatcagcttttcctgcagttcgccagcttgtttttcgatgtgagccatcttacacctctaccttagaactgaaggccagcttcacgggcagcatctgccagtgcctggacacgaccatgatattggaacccggaacggtcaaaggatacatctttgatgcctttttccagagcgcgttcagcgacagctttacccacagctgcagccgcgtctttgttaccggtgtacttcagttgttcagcgatagctttttctacagtagaagcagctaccagaacttcagaaccgttcggtgcaattacctgtgcgtaaatgtgacgcggggtacgatgtaccaccaggcgagttgcgcccagctcctggagcttgcggcgtgcgcgggtcgcacgacggatacgagcagatttcttatccatagtgttaccttacttcttcttagcctctttggtacgcacgacttcgtcggcgtaacgaacacccttgcctttataaggctcaggacgacggtaggcgcgcagatccgctgcaacctggccgatcacctgcttatcagcgcctttcagcacgatttcagtctgagtcggacattcagcagtgatacccgcaggcagctgatggtcaacaggatgagagaaacccagagacaggttaatcacattgcctttaaccgctgcacggtaacctacaccaaccagctgcagcttcttagtgaagccttcggtaacaccgataaccatactgttcagcagggcacgcgcggtaccagcctgtgcccaaccgtctgcgtaaccatcacgcggaccgaaggtcagggtattatctgcatgtttaacttcaacagcatcgttgagagtacgagtcagctcgccgtttttacctttgatcgtaataacctgaccgttgatttttacgtcaacgccggcaggaacaacgaccggtgctttagcaacacgagacattttttcctccgattaggctacgtagcagataatttcgccaccaagaccagcctggcgcgctgcacgatcagtcataacacctttagaggtagaaacaactgcgatacccagacccgccataactttcggcagctcatctttacgtttatagatgcgcagacctgggcggctgacacgctgaatgctttctacaacagctttgccctggaaatacttcagagtaagttccagttcaggcttggtgtcgccttcaactttaaaatcttcaataaaaccttcttccttcagcacgttggcgattgccactttcagcttggaggaaggcatggtgaccgcagctttgttcgcggcctgaccgttacggatacgggtcagcatatccgcgatcggatcttgcatgctcatctgtctttactcccgtgattcaattggtgacaattaccagctagcctttttcagacccgggatttcaccgcgcatagcggcttcacggaccttaatacggctcaacccgaacttccgcaggaaaccatgcggacgacctgtttgacggcagcggttacgctgacgagacgggctggaatcacgcggcagagtctgcagcttgagaacagcgttccaacgatcttcgtcggaagcgttcacatcagagatgatcgctttcagttcagcgcgtttcgcgaagtatttatcagctaaagctacgcgttttacttcgcgtgctttcatactttgcttagccatttagtaaccctaccttacttgcggaacgggaagtcaaaggcagccagcagagcgcggccttcttcgtcagatttcgcagtagtggtaatggtaatatccaaaccacgaacgcggtcgactttatcgtagtcgatttctgggaagatgatctgctcacggacacccatgctgtagttaccacgaccgtcgaaagacttagcggacaggccacggaagtcacggatacgaggtacagcaatagtgatcaggcgctcaaagaactcccacatgcgttcgccacgcagagttactttacagccgatcggatagccctgacggattttgaagcctgcaacagatttgcgtgctttggtgatcagcggtttttgaccggagattgctgccaggtctgctgctgcgttatccagcagttttttgtcagcgatcgcttcaccaacacccatgttcagggtgatcttctcgacccgagggacttgcatgacagaattgtagttaaactcagtcatgagttttttaactacttcgtctttgtagtaatcatgcagtttcgccatcgtactactccaaattacttgatagtttcgctgttagacttgaagaaacggacttttttaccgtcttcgaatctaaagcctacacggtcagccttgccggttgccgcattgaagattgctacgttggaaacctgaatagcggcttctttttcaacgatgccacccggttggttcagggccggaaccggcttctgatgtttcttaaccaggttgataccttcaacaatgaccttgccggaagacaggacattcttaactttaccgcgtttacctttatctttaccggttaacacgataacttcgtcatcacgacggattttcgctgccatgattcgctccttagagtacttctggtgccagagagataattttcatgaacttctcactacgaagctcacgagttaccggcccaaaaatacgcgtaccgataggctgctcgctgttgttgttcagaagaacacaagcattaccatcgaagcgaatgacagaaccgtccgggcgacgaacacccttcttggtgcgcaccactaccgccttcagcacatcaccttttttgaccttaccacgcggaattgcttctttgatggtgatcttgatgatgtcgcctacgcctgcgtagcgacggtggctgccacccagaaccttgatacacattacgcgacgtgcaccggagttgtcggcgacgttcagcatagtctgttcttggatcattttagtgctccgctaatgtcaactactactgagacccgaaaatcaggtcgttaaaaatccccatatcgagggcgcggcattataacaccgcttcaaggatatgggtagaaaaaataaacggctcatttctgagccgtttattcgtattgagagagtgtactgtattacagaaccgctttctctacaacgcgaaccagcgtccaggatttagtcttggacagcggacggcattcgcggatttcaaccacgtcaccgataccgcattcgttgttctcgtcatgtacgtgcagtttggtcgtacgcttgatgaatttaccgtagatcgggtgtttcacaaaacgttcgatagcaacaacaatggatttctccattttgtcgctaacaacgcgaccttgcagagtacggattttatcggtcattacgcacccgccttctcgttcagtaaagtcttaacgcgtgcgacatcgcgacgcacttgcttcaacaggtgagactgttgcagctggccacttgcagcctgcatacgcaggttgaactgctcacgcagcaggttcagcagctcggtgttcagctcttcaacgctcttctcacgcagctcttttgctttcattacatcaccgtcttagttacaaaggtggttttaatcggcagtttcgctgctgccagcttgaatgcttcacgggccagctcttccggaacaccgtccatttcatacaggactttacccggctgaatcaaggcaacccaatactccacgttacctttacctttacccatacgcactgccagcggcttttcagtgatcggtttgtccgggaacacacggatccagatcttaccttgacgcttaactgcacgggtcatagcacgacgtgctgcttcgatctgacgggcagtcagacgaccacggccaacagctttcagaccgaagctgccgaagctaacatccgtaccctgcgccagaccgcggttacggcctttgtgcattttacggaattttgtacgctttggttgtaacatcagcgacgctccttatttacggcctttacgctgctgctttttaggctgagcagccggtttttccggttgttcaacagcagccataccacccaggatctcgcctttgaagatccacactttaacgccgattacaccgtaagtggtgtgcgcttcagaggtgttgtagtcgatgtcagcacgcagagtgtgcagcggtacgcgaccttcgcggtaccattcggtacgtgcgatttccgcgccgcccagacggccgctaacttcaactttaatacctttagcgcccagacgcattgcgttctgtacagcacgcttcatagcacgacggaacataacgcgacgttccagctgagaagtgatgctgtcagcaaccagttttgcgtccagttcaggcttacgaacttcggcgatgttgatctgtgcaggaacgccagcgatgtccgctacgaccttacgcagtttttctacgtcttcaccttttttaccgataacgatacccgggcgagcagtgtgaatggttacacggatgctcttagccggacgctcgataacgatacgagatacggacgctttagccagttccttagtcaggtactgacgtactttaaaatcgctgtccaggttgtcagcgaattctttggtgttcgcaaaccaggtagagttccatggttttacaatacccaggcgaataccattaggatgtactttctgacccattgctagtctccagagtctcagcgatcggacacaaccacagtgatgtggctggtgcgcttcaggatgcgatctgcacgaccttttgcacgcggcataatgcgcttcatgctcgggccttcgtctacgaaaattttcgtaactttcagatcgtcaatgtcagcgccatcgttgtgttcagcgttagcaatggcagattccagaactttcttgaccagtacagccgctttcttgttggtgtaggtcaaaatatccagagcctggctcactttcttaccgcgaatcaggtcagcaacaaggcgaaccttctgagcagaagaacgagcatggcgatgtttagcgatagtttccatctcttcctcctaccttatttcttcttcgcttttttatcagcagcgtggccgcgataagtacgagtcggtgcgaattcacccagtttgtgaccaaccatttcgtcggttacaaataccggaacgtgctgacgaccattatggacagcgatggtcaaaccgatcatgttaggaaagatcgtactacgacgggaccaagtgcgcaggggcttcttgtctccgctttccaccgctttctctaccttcttcagcaagtgcaggtcaataaaaggacctttcttgagagaacgtggcatggcttatcctctaaaattatttgctacggcgacgtacgatgaatttatcagtacgcttgttgctgcgggtcttcttacctttggtctgaacgccccacggagttaccgggtgcttaccaaagttacgaccttcaccaccaccatgtgggtggtctaccgggttcatcgcggtaccgcgaacggtcggacgaacaccacgccagcgtgcagcacctgctttacccagaacgcgcagcatatgctcagcattgccaacttcgcccagagttgcacggcagtctgcttctactttacgcatttcaccagaacgcagacgcagggtgacataagcaccatcacgagcaacgatctgaacgtaagtaccagcggaacgtgccagctgaccgcctttacctggtttcatttctacgttatgaacagtagaaccaaccgggatgttgcgcatcggcagggtgttacctggtttgattgcagcatcaacgccagactgaatctggtcgccagctttcaggcctttaggggccaggatgtaacggcgttcaccgtctttgtacagaaccagcgcgatgttcgcggaacggttcggatcgtactcaagacgttcaacaactgccgggataccgtctttgttgcgtttgaagtcaacaatacggtaagcctgcttgtggccaccaccgatatgacgagtggtgatacggccattgttgttacgaccaccggatttgctgtttttttccagcaacggagcaaaaggtttgcccttgtgcagctcagggttaaccactttaactacgtggcgacgacccggagatgtcggtttacatttaacaactgccattgtattactcctccgacttactcagcgccgccaacgaagtccagattctggccttctttcagggtgacgtaagcttttttccagtcgctacgacgaccgatacgctgtccgtgacgtttaactttccctttaactaccagggtgttaacgacttcgacttcgacttcaaacagtttctgcacagcagctttgatttctgctttggtcgcgtctttagcaactttgagtacgatggtgttggatttttccatcgcagtagacgctttttcagaaacgtgcggtgcacgcagcaccttcagcagacgttcttcacgaatcatgccagcatctcctcaacttgcttaacagcatcagcagtcattacgactttgtcgaaggcgatcaggctaaccgggtcgataccagttgcatcgcgtacgtcaaccttgtgcaggttgcgcgcagccaggaacaggttttcgtccagctcaccggtgatgatcagcacatcttccagagccatgtctttcagtttctgtgccagcagcttagttttcggcgcttctacagagaacttctcgacaacgatcagacgatcctgacgtaccagttcggacaggatgcttttcagcgcgccgcggtacatcttcttgttaactttttgactgtggtcctgcggacgagcagcaaaggtcacgccaccagaacgccagatcgggctcttgatagaaccagaacgcgcacggccggtgcctttctggcgccacggttttttaccggaaccagttacttcagcacgagtcttctgagcacgagtaccctgacgagcaccagctgcataagcaacaacaacctggtgaaccagcgcttcgttgaaatcacgaccgaaggtagtttcggaaacagtcagcgcgctctgcgcgtctttcaatactaattccattgctatctccttacgccttcacagctggtttaacgatcaggtcgctaccggttgcacccgggacagcacctttaaccagcagcaggttgcgctcagcgtcaacgcgtactacgtcaaggctctgaacggttacacgttcgttacccatctgacctgccattttcttgcctttgaacactttgcccggagtctggttctgaccgatagaacccggaacgcggtgagacaaggagttaccgtgagtagcgtcctgggtacggaagttccagcgcttaacggtacctgcgaaacctttacctttagaggtgccagttacgtcaacttttttaacgtcagcaaacagttcaacgctaatgctctgacctacagtgaactcttcgccttcagccaggcggaattcccacagaccacggccagcttctacgccagctttagcgaagtggccagcttcaggcttggtcacacggttagcttttttagcaccggtggtcacctgaatagcacggtagccatcgttagccaggtctttaacctgagtaacgcggtttgcttcaacttcgattacggttactgggatagaaacgccgtcttctgtgaagatacgggtcatacccacttttttaccgactaaaccaatcattgtttcaacctctcaatcgctcaatgacctgattaacccaggctgatctgcacgtctacaccggcagccagatccagacgcatcagagcatcaacggttttctcggttggctcaacgatgtcaaccagacgcaagtgagtacggatttcgtactgatcgcgcgcgtctttgttgacgtgcggggagatcagaacagtgaagcgctctttgcgtgtcggcagcgggatcggaccacggacctgcgcaccagtgcgcttggcagtctcgacgatttccgcggttgcttgatcgatcagacgatgatcaaacgctttcaggcggatacggattctttggttctgcatgagaccagagctccaattattttataaacgaaaatgattactcctcagacccattacgattgatgggagagtgtaaccgttcttacgtagctccccgattgggagcattgttaggtagccaaattcggctaactgaggttcagattgaacctgctgtcaactacgacaagcccgcgcattatacatacttaaccaccgaacgcaagcgtattgctagtaaagtaaacagccttcgggttatctctcaagttcgttcagtgcatttttgacacgctctcttaaaccggctttctcttcgctttcttccacagtattttcttcgtcttcagaagaagagggggcattctcaaccgcgacgcctgggtcatcttcctcctcgacggattcgacgacggggagtggctgttttttgaagaaatagtgttgtgtactttgtttaaaagcgggcgtttcagcctctacagtgacttcggcttttactatccaaagcacccatagctgcctggcatacccaccaaccagcaccattcctgcaaaccacaggcaaatcagtaataaacaaattacatatattatggtgctgtgtttttgtcgggagaagataccagggtgacctgtttctttctgctcacgcgcggcgatatagaattcaaacattataatcccttgtgacgtaaaaactgcaaaacaaaagtcctacgcaggaattatttacgttttacgagaacccttcaatatgaattaaattacggcattaaaaataagaaaaaagcctgacaaatgaagcattttaaaaacagaaacattcatatttaaaatgttaaattgaattgatattttaaatatgaataatttattcgttctgacagtacgaataagatatgccgtcaacaaatgcaaaaagggcgccgaagcgcccttttcaattcaaaactaattaacgtgtaattagcccagaactttagcaacaacgcccgcgccaacggtacggccgccttcacggattgcgaaacgcagaccgtcgtccatcgcgatcgggtggatcagggtaacaaccattttgatgttgtcgcccggcattaccatctctacgccttccggcagttcgatggtaccagtcacgtcagtagtacggaagtagaactgcggacggtagcctttgaagaacggagtatgacggccgccttcatctttggacagaatgtacacttcagattcgaacttggtgtgcggcttgatggtgcccggcttagccagtacctgaccacgttcgatttcttcacgtttgataccacgcagcagaacacctacgttctcaccagcacggccttcgtccagcagtttgcggaacatttcaacgccagtacaggtagacttctgagtctctttgataccaacgatttcaacttcttcaccaactttgatgataccgcgttctacacgaccggtaacaacggtaccacgaccggagatggagaatacgtcttcgatcggcagcaggaacggcttgtcaatcgcacgctctggttccggaatataagaatccaggaagccagccagttccaggattttcgcttcccactctgcgtcgccttccagcgctttcagagcagaaccacgaacgatcggagtgtcgtcgcccgggaagtcgtactgagacagaagttcacgaacttccatttcaaccagttccagcagctcttcgtcatcaaccatgtcgcatttgttcaggaacacgatgatgtacggaacgcctacctgacgacccagcaggatgtgctcacgagtctgcggcatcgggccgtcagtcgcagcaactaccaggatcgcgccgtccatctgagcagcaccggtgatcatgtttttaacatagtcggcgtgccccgggcagtctacgtgtgcgtagtgacgggtcggggtgtcgtattcaacgtgagaagtgttgatggtgataccacgagctttttcttccggcgcgttatcgatctggtcgaatgcacgagcagcaccgccgtaggttttagccagtacggtggtgattgcagcggtcagagtagttttaccgtggtcaacgtggccgatagtaccaacgttaacgtgcggttttgtacgttcaaatttttctttagacacggctatattccttactatagtgctctccccttcaggagagagcacgggactttggtattaacccttaggcttatttaccacgggcttcaattacggcctgagcaacgttactcggcgcttcatcatacttcaggaattccatagtgtaacttgcacgacctttggtcagagaacgcagctgagttgcgtatccgaacatttcagacagcggtacttcagcgtggatcttaacgccagtaacttcagattcctgacctttgagcataccacgacgacggctcaagtcaccgataacgtcaccggtgttctcttccggagtttctacttcaaccttcatgatcggctcaagcagaactggtttcgctttcttaaagccttctttaaaggcgatagaagcagccagtttaaacgccagttcagaggagtcaacgtcatggtaagaaccgaagtgcagacgaatacccatgtctactaccgggtagcctgccagcggacctgctttcagctgttcctggatacctttatcaacggccgggatgtattcgccagggattacaccacctttaatgtcgttgatgaactcgtagcctttcgggttactacccggctccagcgggtacatgtcgataacaacatgaccatactgaccacgaccaccagactgtttcgcgtgtttaccttcaacatcggtaactttctggcggatagtttcacggtaagcaacctgcggtttacctacgttcgcttcaacgttgaattcacgcttcatacggtcaacgatgatgtcgaggtgcagttcgcccatacccgcgatgatggtctggttagattcttcgtcagtccatacacggaaagacgggtcttctttagccagacggcccagagccagacccattttttcctggtcagctttggttttcggttcaactgcgatggagattaccggctcagggaattccatacgttccagaatgatcggcgcatccgggtcacacagggtgtcaccagtggttacgtctttcagaccgatagcagcagcgatgtcgcccgcgcgaacttctttgatctcttcacgtttgttagcgtgcatctgaacgatacgaccgaaacgctcacgtgcagctttcacggagttcagtacggtatcaccagagttaaccacaccggagtaaacacggaagaaggtcaggttaccaacaaacgggtcggtagcgattttgaacgccagtgcagagaacggctcgtcatcacttgcgtgacgttcagccggagtgtctttaccgtcgtccaggataccgttgatcgcaggtacgtcaaccggggatggcaggtaatcaattaccgcatccagcatcgcctgaacacctttgttcttgaacgcagaaccacaggttaccaggatgatttcgttgttcagaacgcgctgacgcagagcacctttgatttctgcttcagtcagttcttcaccacccaggtatttttccatcagctcttcagaagcttcagctgcggattcgatcaggttctggtgccattcgttagccagttcaaccatgtctgccgggatatcttcgtattcgaaggttacgccctggtcagcgtcgttccagttgatagctttcattttcaccaggtcaacaacaccggtgaaatgttcttcagcaccaatcgccagctgcagcggaaccgggttcgcgcccagacgggttttgatctggttaacaactttcaggaagttcgcacccatgcggtccattttgttaacgaacgcaatgcgcggaactttatatttgtttgcctgacgccatacggtttcagactgcggctgaacaccaccaactgcgcagtaaaccattaccgcaccatcgagaacacgcatggaacgttctacttcgattgtgaagtcaacgtgccccggggtgtcgatgatgttgatgcgatgcggctcatactgcttagccataccagaccagaatgcagtagtcgcagcggaagtgatggtaataccacgttcctgctcctgctccatccagtccatggttgcagcgccgtcatgaacttcaccgattttatggtttacaccggtgtagaacagaatacgttcggtagtagtggttttaccggcgtcgatgtgcgcactgataccgatgttacggtagcgtgcgatgggtgttgtacgagccatttgtttcctcgtttatcttttaggcgttcaatttaagtagcccaaagcgggctgcttactggaagcgcccgcctggtgactaaaactccgaagggataaccaacggtagtgtgcgaacgccttgttggcttcggccatacggtgaacgtcttcacgtttcttaactgcagtacctttgttttctgcagcatcagaaagttcgttcgccaggcgcagagccatggatttatcaccgcgtttacgagcagcttcaacgatccaacgcattgccagagcattacgacgaaccggacggacttcaactggtacctgataagtagaaccaccaacgcggcgagacttaacttctacagtcgggcgcacgttttcgagagctacttcgaatgcttccagttcagatttaccagagcgctgagccagggtctccagcgcgctgtatacgatagattcagcagtagattttttaccatctaccatcaggatatttacaaatttagccagcagttcacttccgaacttcggatccggcagaattttacgctgaccaatgacgcgacgacgtggcatggaaatactccgttgttaattcaggattgtccaaaactctacgagtttagtttgacatttaagttaaaacgtttggccttacttaacggagaaccattaagccttaggacgcttcacgccatacttggaacgagcctgcttacggtctttaacgccggagcagtcaagcgcaccacgtacggtgtggtaacgaacacccgggaggtctttaacacgaccgccacggatcaggatcacggagtgctcctgcaggttgtgaccttcaccaccgatgtaggaagtcacttcgaaaccgttagtcagacgaacacggcatactttacgcagcgcggagttcggtttacgaggagtggtagtatatacacgagtacatacgccacgtttttgcgggcatgcttccagcgcaggcacgttgcttttcgcaactttgcgagcacgtggtttgcgtaccagctggttaactgttgccattaaatagctcctggttttagcttttgcttcgtaaacacgtaataaaacgtcctcacacaatatgaggacgccgaattttagggcgatgccgaaaaggtgtcaagaaatatacaacgatcccgccatcaccaggccatctggctggggtgcttaaccgtaagtctgacgaaatcagtatagtcaatgagaatgatgtcgttgctaatttgaccagtcaaaccgcgggcaataaggtcttcgttcagggcatagaccttaatgggggcattacgcagactttcaaggtagcggttaccgtcaactgcggcagttacgccatcttgcaataatagcagttcgtctccttcactgagcagacgcagcagcgcagcaaaatccgtcagccagggactgcgatgtaatgtgtgcagcataaacgcctcaaaacctcaaaataacatcgtagttggcgagttcgcggcgtaaggcatctgcttcgagcggcgtggcttcgacaacaaagggtgtctgcggatctaacccgcgttcgcgcagactagccgcacaaacccagcactgttcaatgtcgtacagacccaacaatttaaaagtggcaatgtaatcacgcgccagcactgcatcgggcttttgtcctggcagcagctgaaaaacgccatcagctataaagaagacagccagatcgtcagttaatgcggaagttgccagtaaagcatctaaaccttcccggcctgcggctgtaccatgaggtgcagtagaaaaaacaaacgcaattcgtttcatcagaactgtaccaccctgtcacaggtcaggctggcttccgccagcgccccaagtccgcttaaggtaaatccctgctgaaggttactgctagccagccccagtcttccggcctccgtttcatcaacaacgccacggcgtaatgctgccgctacgcagatattcagcgccacaccatgttgcgcattcagttgttgccaggcccgtacgaggtcaaattcgtcacttgccggagaggtcaattggttagcgttatagaccccttcccgatagaaaaagacgctgcttaactcatggccatctgctatcagcgcctgcgcaaactgaaaagcactactcgcctgttgcgtaccgtatgctggcccggtcaccacgatggcaaaacgcattacttatcttgcccctggaaatcaccgctcttgaactggcggatgtagagatagacagtgtgtttggagatgttcaggcggtcagcaacctggttgatcgcatctttaatatcgaagatccctttctcgtagagattcagcacgatctgacgatttttggcgttattagaaacattgcgatcggcattcacttcttcgatggtgaactccagcgtttgggtaaccagatcttcaacagaagaggcaaagttgacgctactaccgacatccggggtttctggcggcacaaaggtgctcataatctggctgaagggaacatcaagattcatattgatgcacagcagaccaattacacgctgttcgcggttacgaatcgcgatagtcagggacttcattaatacgccgcttttggcgcgagtaaagtagcatttagaaacgctgctatccgctcccgtcatatcgtgcagcatacgtagcgccaggtcagtaattgggctaccaatcttccggcctgtatgttcaccgttagcaatgcgaatggcactacattttagatcctgcaaagagtgcaaaacgatttcacagtgggagccaataagcatcgctaacccgtccaccaccgcttcgtaggatttcagaatatcaaaatcggtctggtcgaaaggacgttgatccagtaaatccaactcactggtttcgttggttaaaaggctcctggacatgaaaaaaaacactccttttcaggagcctgtcgttaacttttcagggcaggctcattaatgatgcgggtaactaaattaatacagcggaggttccgctttccagcactaattatatccggcctgtaataaaaaaaccgccgcctggtcaggcggcggttcttaatgcttattttttagcagaatctgcggctttcgcatcagcttccggctttgcatcagccttcggcgctggtttcacatccagcagctctacgtcaaacaccagggtagaattcggtgggatccccggaacacccgctttgccgtaagccagttctggtggaataaccagtttgatcttaccgcctttcttgatgttcttcagaccttctgtccaacccgggataacaccgtccagacggaaagaaagcggttcaccacgggtgtaagagttgtcgaactctttaccgtcgatcagcgtacctttgtagttcactacaacagtatcgctgtctttcggtgcttcgcctttaccggcttctactacctgataaaccagaccagtactagaggttttcacacctttctctttggcaaatttctcgcggtactctttaccttttgcttcgttatcagccgcgtctttttccatcttcgcctgagcagaagacttcacgcgagcttcgaatgcttgtagagtctgttcgatctcttggtcggagagtttgcttttatcagcaaatgcatcctgaacaccagcgatcagctgatctttatccagtttgatgcccagtttttcttgttcttttagagagttttccatgtaacgacccaggctggcacccagtgcataagcacttttctgatcgtcatttttgaacgctgctttgctgtcagcagctgtagcaggttttgcagcttcagcagcaaaagtgattggtgcatgcagggcaacggccattgtggtcgccagcagcgttactttaaacagacttttcatccatatctccaggatcggggcatctcaccccagggttaactattatcagaagggtactataaagcgttgtcgaacaaatctacatacagacacgccctattatcatctattttcagactctttttgtttaaattagtttcgatgaccgcgaaatgagtgctgtctcgggcagcaaagttaagtagaatccgcggcgaccattcgacaaaagaggtgaatcatgcaggatttaagtttggaagcacgcctggcagagctggagagccgactggcttttcaggaaatcaccattgaagaactgaacgtcacggtgaccgctcatgaaatggagatggcgaaactgcgcgatcatctgcgtctgctgaccgagaagttaaaagccagccagccgagcaacatcgcgagccaggctgaagaaacgccaccgccacattattgaggcgtaaaaaaagcggggattccccgcttttttgtcactttttcggtattagtggcaaccgcaaccgccgttgcctttaccgccacagcagccttcgccaccgtgttcatgaccgtgatcgtggccatgaccgccgcagcaaccgtcgtggtcgtgatcgtggtggtgatcgtgcgcgccgtgaacgtgaccatgagccagttcttcttcagtcgcttcgcgaatcgccacaacttcaacgttgaatttcaggttctgaccggccagcatgtggttaccatcaaccacgacgtgatcgtcttcaaccgcagtgatttcaaccggtaccggaccctggtcggtttcagccaggaaacgcatacctacctgcagttcatcaacgcccataaatacgtctttaggaacacgttgcaccaggttttcgtcgtactgaccgtaagcgtcgttcgcgccaacagcgacatcaaatttgtcgccaacttcatgaccttccagcgccgtttccaggccagagatcagggaaccgtgaccatgcaggtagtccagcggcgcactcaccggagactcatcaaccaacacaccgtcttctgtacgtacctgataggccaggctgaccaccaggtcttttgctactttcatgatatctcctgagcatgggaagaatagtggcgcagattgtagcggaattctgcagccgtgtactcactagcttaaaaaaactcggcgcatatcgttagtccggatgaaaaatcccgatcacttgctcatctttgcgaacgtgatcgcgggcttctttgtctgcttctcgcatctgatgtccgcacttaacacattcaacaatatcaatattattttcgcgccacatcgccatactatcctgcgcctgacaggccgggcattttgcgcccgcaataaaacgttttcggattgccatctttaccctttactcaaattcatcccagccgtccagctggcgtcgttcttgttgcatttcacgctggaaaatctcttccagttcgcgtcgggcttccctggcgcgagaaatttgtacggtatcggcatgcattgggatgagctctcgcagcatccgcatatccaggcggcgaaaatgcagttgcgctcgctgtgcctgatgcggatgcatgccaagcgtgaccagcgtcttgcgccccagctctaacgcactggagaatgtttcacgggaaaactgcgtcacccctgcctgtaataactcatgcgcttccacacgtccgcgcgctcgcgcaagaatatgcaaatgcggaaagtgctgttggcatatttccaccagcttcatggtgtcttccggctcgttacaggtaatgacgatagactcagcggcctctgcacccgcagaacgtaaaagatcgacctgcgtggcgtcgccgtaataaactttgtagccgtatttacgcatcaggttaacggcgctgatatcccgctccagcacggtaatgcgcattttatttgccatcagcaaacgaccaatcacctgaccaaaacgcccgaagcccacgacaatgacctggggtttatcatcgttgacccacggtttttcgtcttcttcttccggtccgttaaactggcgggatagccatttatccaccagcttcatcagcaacggcgtggtcatcatggaaagcgtcaccgtcaccagcaacaacgccatctggtcgccctggaataagcgttgactagaagcggtagaaaagaggacaaaggcaaactcaccaccctgactcaacacgccagcaaactgcatccgctcactgctacgcacgccatacaatcgcgccagcagatacagcacgagaattttcaccgccaccagcacaaccacgcttatcactacccacaacagatgggtataaagcaccccgaggttgagactcatgccgacagagataaagaacaaaccgagcagcaagcctttgaagggatcgatagccgtttccagttcatggcgatattcactttccgccagcagcacgcccgcaataaatgtaccgagcgccatgctcagccccagcgcatccataaacaatgcggaacccaacaccagcagcagcgtcgcggcggtgaacacttcccgcacgccagaagctgcaataaagcggaataccggacgcagtaaatagcgcccaccaatcagcatgccgacaaacgccagcaccttcatgccgaccttcatccagtcgaaatgttcgtctgcgctccccgccaacaacggcactaacgccagtgctgggattactgccagatcctgaaacagcagaacgctaaacccgagctggccggattcgctgcgattcatccctttctcacgcatcaattgcaacgccattgcagtactagacatcgcaaggccaatgccaccgaccaccgccgcctgccaggcgaaatccgtcagcatcaataatcccgccagcaacgccgcgcttaacagcacctgtgccgcgcctacgccaaaaatgctacgccgcagttgccaaagtttggagggattcaactcaaggccgatgataaacatcaggaataccacgccgagttcgctaaagtggaggatctcatcgacgtcgctaataaaccccagcccccacgggccaattgcaatccctgccagcaaatatcccaacacagcgccaatacccagccggcttgccagcggcaccgcagccaccgccgcgaagagaaacagcactcctgcgagtaaaaaatcggaaccttccatcagcggcctcctggagacagcggatttgccagccagtcaccgtaggctctggcgtggctcgccagctcctgtgcgctttgccgtctcgcccagtaaataatgatgggacttaaccaatgcatccggcacatgcccgccgccagttcaaaggggcgcagcacatcgctcatcgggtagcgattcagcgcgtcataacggtaagcactttccggctcgccggtggtaatcacgctacgccagtactttcccgccagttggtttcctcccggcccgctggcaaaaccacgacttaatacccggtccagccactctttcagtagcgccgggcagctataggtataaagaggatgctgaaagacaatcacctcgtgctcgcgcagtaatgcctgctcacgggggatatcaataaaaaaatcgggatagtgcgcgtaaaggtcgtgcacggtaacattgctgagctgcgtggccggtttaagcagtacccggtttgccacgctgtcctgagattccggatgggcatacagcagcaaaactttcgctggctgagacatcatccccctcccggtatggtttttgtgtatagtcgctgttttgggctaccattgcgcccggtgcggcagctcgcccatacattacattatcataatgataagttaacatagtctgaacatacggcaccttatgattgttttctccagcttacaaattcgtcgcggcgtgcgcgtcctgctggataatgccaccgccaccatcaaccctgggcagaaagtcggcctggtgggtaaaaacggctgtggtaaatctaccctgctggcattgctgaaaaatgaaatcagcgccgacggcggcagctacacctttccgggaagctggcaactggcgtgggtgaatcaggaaacgccggcgttaccgcaagcggcgctggaatatgtcattgacggcgaccgtgaatatcgtcaactagaagcgcagctacacgacgccaacgaacgtaacgacgggcacgccattgcgaccattcatggcaagctggatgctattgacgcatggagtattcgctcccgtgctgccagcctgctgcacggcctcggtttcagcaatgaacaactggagcgcccggtaagtgatttttccgggggctggcgtatgcgtcttaaccttgcccaggcgctgatttgccgtagtgacttgctgctgctcgacgaaccgactaaccacctcgatctcgatgccgttatctggctggaaaaatggctgaagagctatcagggcacgctgatcctgatctctcacgaccgcgacttcctcgatccgatcgtcgataaaattattcatatcgaacaacaaagcatgttcgagtacaccggcaactacagtagctttgaagtacagcgcgccacccgtctggcgcagcaacaagcgatgtacgaaagccagcaggaacgcgtagcgcatctgcaaagttatatcgaccgtttccgtgccaaagccaccaaagcgaagcaggcccagagccgcattaagatgctcgagcgtatggagctaattgcccccgcgcacgtcgacaacccgttccgctttagcttccgcgcgccggaaagcctgccaaatccgttactgaagatggaaaaagtcagcgcgggctatggcgatcgcattattctcgacagcattaaactgaacctggtgcccggcagccgtattggtctgttaggccgcaatggcgcgggtaaaagcacattaatcaaactgttagccggtgaacttgcgccagtcagcggtgaaattggtctggcgaaagggatcaaactcggctacttcgcccagcatcaacttgaatacctgcgcgccgacgaaagtcctattcaacatctggcacgtttagcgccgcaggagctggaacaaaaactgcgtgactacctcggcggctttggtttccagggcgataaagtaaccgaagaaacgcgccgcttctccggtggggaaaaagcccgcctggtgctggcattaattgtctggcagcggccgaatctgctgctgctcgacgaaccgactaaccaccttgacctcgacatgcgtcaggcactcaccgaagcattaatcgagtttgaaggcgcgctggttgtcgttagccacgaccgtcatttgctgcgttccaccactgacgatctctacctggttcacgatcgtaaagtcgaaccgttcgacggcgatctggaagattatcaacagtggttgagcgacgtacaaaagcaggaaaaccagaccgacgaagcgccaaaagagaatgcgaacagcgcccaggcacgtaaagatcagaagcgtcgggaagctgagctgcgtgcgcaaacccagccactgcgtaaagagattgcccgtctggaaaaagagatggagaagctgaacgcgcaactggcgcaggcggaagagaaactcggcgacagcgaactgtatgaccagagccgtaaagcggagttgaccgcctgcctgcaacagcaagccagcgccaaatccggcctggaagagtgcgaaatggcatggctggaagcccaggagcagcttgagcagatgctgctggaaggccaaagcaactgatggcgcagataacgacgaccgatgccaatgaattcagcagcagtgctgaattcatccccatgcgcggctttagcaattgtcatctgcaaaccatgctgccgcgtctgtttcgtcgtcaggtgaaattcaccccgtactggcagcggctggagttgcccgacggcgattttgtcgatcttgcgtggagtgaaaaccctgcacaggcgcaacataaacctcgtctggtggtgtttcacgggctggaaggcagtctcaacagcccttacgcccacggtctggttgaggcggcgcaaaagcgcggctggctgggcgtggtgatgcattttcgcggatgcagcggtgaaccaaaccgtatgcaccgcatttaccatagcggcgaaaccgaagacgccagttggtttttacgctggctgcaacgcgaatttggtcatgcgccaacggctgccgtcggctatagcctcggcggtaatatgctggcctgtttgctggcaaaggaaggcaatgatctcccggttgatgcggcggtgattgtctctgcgccgtttatgctggaagcctgtagctatcatatggaaaagggcttttcccgcgtttatcagcgttacttgctgaacctgttaaaagccaatgccgcgcgcaagctggcagcctaccccggaacgctgccgattaatctcgcgcagttaaaaagcgtacgtcgcatccgtgaatttgacgatctcatcaccgccagaattcacggctacgccgacgctatcgactattatcgtcagtgtagcgccatgccgatgctgaaccggatcgccaaaccgacgctgattattcacgccaaagacgatccgtttatggatcatcaggtgatcccgaaaccggaaagtctccccccgcaggtggagtatcaactgactgaacatggcggtcatgttggctttattggcggtacattacttcatccgcaaatgtggctggagagtcgcattcctgactggttaacaacgtatctggaggcgaaaagttgttgatattaacgtatctggaggcgaaatcatgttgattccgtggcaagacctctcccccgaaacgctggaaaatttaattgaaagctttgtgttacgtgaaggcaccgattatggtgaacatgagcgtacacttgaacagaaagtcgccgacgtcaaacgccagctacagtgcggagaagcggtgctggtatggagcgagctgcacgaaacggtcaatattatgccgcgcagtcagtttcgcgaataacctgcaaccgtcggcggacgagataataatgatagctaagtcatggagttactatgtctgccaaacatccggtcattgcggtaacaggatccagcggcgcggggaccaccaccaccagcctcgcgtttcgtaaaatattcgcgcagttaaatctgcatgcagctgaggtggaaggcgacagttttcaccgttacacccgcccggaaatggacatggcgatccgcaaagcgcgcgacgccgggcggcatatcagctacttcggccccgaggctaacgacttcggcctgctggaacaaaccttcattgaatacggtcagagcggcaaagggaaatctcgcaaatatctgcatacctacgacgaagccgtaccgtggaatcaggtaccggggacattcaccccctggcaacctttaccggaacccactgatgtactgttttatgaaggtttacacggcggcgtagtcacgccacagcataacgttgcgcagcatgtggacttactggtcggcgtggtgcctatcgttaaccttgagtggattcaaaaactgatccgcgacaccagcgagcgcgggcacagtcgagaagcagtgatggacagtgtagtgcgtagtatggaagactatatcaactacatcacaccgcagttttcccgcacccatcttaacttccagcgcgttcccaccgtcgacactagtaacccgttcgcggcaaaaggtatcccgagcctcgatgaaagctttgtggtgatccattttcgtaatctggaagggatcgatttcccctggctgctggcgatgttgcaaggcagtttcatttcccacatcaatacgttagtggtaccgggcggcaaaatgggtctggcaatggaattaattatgctgccgctggtgcaacgattgatggaaggaaagaaaatcgagtaactctgctattacgccggataaaatactatccggcttcacaacgggatagttaagtcacgcggcaaccacttcatagctgtgagtaatattcaccgctttttccagcatcaacgccacactacaatatttctcggcagagagatcaaccgcacgcgcaaccgctgcgtctttcaggtcgcgaccggtgacgataaaatgcagattaatgtgcgtaaacaggcgtggtgcctcttcgcggcgttcagaggtcaattttacttcacaatcgaccacatcctgacgccctttttgcaggatgctaaccacatcgatggcactgcaaccacccgccgccatcaacaccatttccatcggacttggtgctttatcgccactgttgccgtccattaaaatctgatgaccagaggcggattcgcccagaaaagttaacccttcgacccacttcactcgcgcttgcatttttgctactccactgcgtcaattttcctgacagagtacgcgtactaaccaaatcgcgcaacggaaggcgacctgggtcatgctgaagcgagacaccaggagacacaaagcgaaagctatgctaaaacagtcaggatgctacagtaatacattgatgtactgcatgtatgcaaaggacgtcacattaccgtgcagtacagttgatagccccttcccaggtagcgggaagcatatttcggcaatccagagacagcggcgttatctggctctggagaaagcttataacagaggataaccgcgcatggtgcttggcaaaccgcaaacagacccgactctcgaatggttcttgtctcattgccacattcataagtacccatccaagagcacgcttattcaccagggtgaaaaagcggaaacgctgtactacatcgttaaaggctctgtggcagtgctgatcaaagacgaagagggtaaagaaatgatcctctcctatctgaatcagggtgattttattggcgaactgggcctgtttgaagagggccaggaacgtagcgcatgggtacgtgcgaaaaccgcctgtgaagtggctgaaattagctacaaaaaatttcgccaattgattcaggtaaacccggacattctgatgcgtttgtctgcacagatggcgcgtcgtctgcaagtcactagtgagaaagtgggcaacctggcgttcctcgacgtgacgggccgcattgcacagactctgctgaatctggcaaaacaaccagacgctatgactcacccggacggtatgcaaatcaaaattacccgtcaggaaattggtcagattgtcggctgttctcgtgaaaccgtgggacgcattctgaagatgctggaagatcagaacctgatctccgcacacggtaaaaccatcgtcgtttacggcactcgttaatcccgtcggagtggcgcgttacctggtagcgcgccattttgtttcccccgatgtggcgcagactgatttatcaccccgatatcaactatgcacttcgacaaacgctggtgctatgtttgcccgtggccgttgggttaatgcttggcgaattacgattcggtctgctcttctccctcgttcctgcctgttgcaatattgcgggccttgatacgcctcataaacgttttttcaaacgcttaatcattggtgcgagcctgtttgccacctgtagcttgctgacacagctactactggcaaaagatgttcccctgccctttttgctgaccggattaacgctggtacttggcgtcactgctgagctggggccattgcacgcaaaattgcttcctgcaagcctgctcgccgccatttttaccctcagtttggcgggatacatgccggtctgggaaccgttgctcatctatgcgttgggcactctctggtacggattgtttaactggttttggttctggatctggcgcgaacaaccgctgcgcgagagtctaagtctgctgtaccgtgaactggcagattattgtgaagccaaatacagcctgcttacccagcacaccgaccctgaaaaagcgctgccgccgctgctggtgcgccagcaaaaagcggtcgatctaattacccagtgctatcagcaaatgcatatgctttccgcgcaaaataatactgactacaagcggatgctgcgtattttccaggaggcgctggatttacaggaacatattagcgtcagtttgcatcagccggaagaggtgcaaaagctggtcgagcgtagccatgcggaagaagttatccgctggaatgcgcaaaccgtcgccgctcgcctgcgcgtgctggctgatgacattctttaccatcgcctgccaacgcgttttacgatggaaaagcaaattggcgcactggaaaaaatcgcccgccagcatccggataatccggttgggcaattctgctactggcatttcagccgcatcgcccgcgtgctgcgcacccaaaaaccgctctatgcccgtgacttactggccgataaacagcggcgaatgccattacttccggcgctgaaaagttatctgagtctaaagtctccggcgctacgcaatgccggacgactcagtgtgatgttaagcgttgccagcctgatgggcaccgcgctgcatctgccgaagagctactggatcctgatgacggtattgctggtgacacaaaatggctatggcgcaacccgtctgaggattgtgaatcgctccgtgggaaccgtggtcgggttaatcattgcgggcgtggcgctgcactttaaaattcccgaaggttacaccctgacgttgatgctgattaccaccctcgccagctacctgatattgcgcaaaaactacggctgggcgacggtcggttttactattaccgcagtgtataccctgcaactattgtggttgaacggcgagcaatacatccttccgcgtcttatcgataccattattggttgtttaattgctttcggcggtactgtctggctgtggccgcagtggcagagcgggttattgcgtaaaaacgcccatgatgctttagaagcctatcaggaagcgattcgcttgattcttagcgaggatccgcaacctacgccactggcctggcagcgaatgcgggtaaatcaggcacataacactctgtataacagtttgaatcaggcgatgcaggaaccggcgtttaacagccattatctggcagatatgaaactgtgggtaacgcacagccagtttattgttgagcatattaatgccatgaccacgctggcgcgggaacaccgggcattgccacctgaactggcacaagagtatttacagtcttgtgaaatcgccattcagcgttgtcagcagcgactggagtatgacgaaccgggtagttctggcgatgccaatatcatggatgcgccggagatgcagccgcacgaaggcgcggcaggtacgctggagcagcatttacagcgggttattggtcatctgaacaccatgcacaccattagcagcatggcatggcgtcagcgaccgcatcacgggatttggctgagtcgcaagttgcgggatagcaaggcgtaatgcaggctaaaccatcggataaggcattcacgccgcatccgacatcttttgcctgatgcttcgtatttacgccccaaccaccttcgccaccgcgtgggcgaaacgttgcatcccttcatcgatatccgcatcttccaccaccaggctcggtgcaaaacgcatcacatccggtccggcattcagcaccattacgccagcctctgcgcccgcatacaggaaatcacgcgcccgacctttgtactgtggtttcagctctgcgccaatcaacagccccataccgcgaatatcgctaaatacatcgtactgctgatcgatcttctgcagatggtcaacaaaacgctggcgtttcgcctgaatgccttccagcacttcaggggtattgatgatatcaaacgccgcccccgctactgcacaggccagaggattaccgccgtaggtggaaccgtgagaaccaggatgaaacgcagaagcaatttccgccgtggtcagcatggcgctaatcgggaagccgccgcctaacgctttcgcagaggtcagaatatccggcgtaacgccgtagtgcatgtaagcaaacaaatcgccggtccgccccatcccgcactgcacttcatcaaacaccaataatgcctgatgttgatcgcacagctcgcgcaagccctgcaaaaactctggcgtcgctgccgtcacaccgccctcgccctggatcggctcaaccaccaccgcacaggtgtgatcatccatcaccgctttcactgcatggagatcgttaaagggaacgtggatgatgtctgccggtttcggcccaaagccgtcggaatattttggctgcccacccacgctaacggtaaacaggctgcgaccatgaaaagcgttatggaaggcaataattttggttttgaacgggctatgacgcacacaggcgtaatggcgtgccagtttaaaggcggtttcgttagcttccgtgccggagttcataaacaccacgcgttcggcaaacgttgcctcaatcagtttacgcccaagacgcagcgccggttcattggtgaaaacgttactgatatgccacagagtttcgccctgggtttttaacgcgttcaccagcgcaggatggcaatggcccaacgccgtaactgcaatgccacccgcgaaatcgacatactccttgccttgctgatcccagattcggctgccctgaccttttaccggaataaactctgccggagcataaatcggcaggatcacttcatcgaaagtcgcgcgtgtaattgctgtttgttcaattgccatctcatgatcaccctgttacgcataaacaaatgtgaaattataaccacaaaatatgcataaaaaatcactaaatggcaatcagaaatcagcgatgcaggaaattagccagcagttgatgtccttgttcgctaagaatactttctggatggaactgcacaccttccagatcccactggcgatggcgaatccccataatctctcgggtttcgctccaggccgtcacgtcaaagcacgctggtaaactgtcaggttccaccaccaggctatggtagcgtgtcacggtaagtggatttgccagcccccgaaatacgccctcaccgttatgtgtaatcgggctggttttgccgtgcatgacctttgcggcgcgcacaactttaccgccaaatgcctgcgccattgcctgatgaccgaggcagacgccaagaatcggcaagcgcccggcatagtggcgaataacgtcaagggagatcccggcttcatctggcgtacaggggccaggactgatgacaattttttgtggtttaagggcgtcgatatccgccagcgtcaacgcatcgttgcgcttaaccagcacatccgcccccagttcacaaaagtactggtagaggttccaggtaaaagaatcgtagttatctataagcaggatcatggcggctccggtacaaaagaaccgcgctattttactcagattccccggcttcgcttaccactttgctaaatatcatctgcagtgcggtgagatcccccattgccccactctgatttgcctgattccaggcctctttttcgataccctgccagctcagttgatatccggcatgaatcgccagttgctcgaagaagatccgctgtgccagaccacttcccacccggaagggatgcagcacgttgatttcacaatagtaatgcgccagccgctcgacgaacttcgctttctccaggccaaccagataaccttcttcctccagatcctgcatcagggcattgccctctttttcgatataagcaaagtggcagaacggcgtatcaccctgataaatatcaacttcacgcagttgccctgcccagtcgaaaatatcctgatacagctggcgatggatagttcgcaaatgcggtaaaccgcgcaccagcggaccaagctcaatggtcgcagcacgcagcgccgtcatttcgtaagcggcctgttccagccgctgctgctggcggatgttcagccggttacgcatgatatcaaggcctggataaagatacggatcgcgcccttcgccgaatttatcgctcatagtgactcctcagctcttcaaggcgcgctaaagcctctgcggcagtaagagtgactaaaggcatctcgacgccttcaagacggcgactggcctgaaaattacgattacgctgaagctcccagagacgggacttttgcttatcggtgagtttcttcacttgatgcctccctgaacgtgtccatttgccacaagtataagcggcaaatccgggttacgccgggagagcagaagcgcgggcaagattgcccgcgcgagaaatcattacggcaggactttagcggaaaggataactaccggtttactcggcacattctggtacggaccaacgtcatgagtcggcacctgggaaatcttatcggcaacgtccatgcctttcaccactttaccaaataccgcgtaaccgaaatcacgctgaccatggtcaaggaaggcgttatcggcaacgttgataaagaactggctggtggcgctgtctttgtcagcggtacgtgccatcgcgatggtgccacgcgtgttgcgcaggccgttatcggcttcatttttgattggcgggtttggttttttctgctgcatctgctcggtgaaaccgccgccctgaatcataaagccaggaatgacgcggtgaaaggtagtgttgttataaaaaccgctgttcacataatcgacaaagttttgcacagacactggcgctttttgtttatccagctccagttcgatgttaccagcactggttgtcaacaatacgtgcgggtcccctttcgctgccattgctgcgggagaaagagcagaaagagcgaaaacagcagccatcgccgccagggtgcttttgaacatgagatttccttaacaaacagagcagaaaaaaagcaagtgaagagattctaaatagccttcaagaacaaggccatccctttacctaattttacgtatctgaaatatatgtaacctgacgatcactttttattccgtgatcaaaatcacctcttaaaatgcaatttagcaaccgattgcaataaaacatttaaacagatcacaaaatcacctaaaatcgcccgctcgcggcatatcccgctatgccattttatttttgaacgcaggccaatcatgactaacagcaatcgcatcaagctcacatggattagctttctctcctacgcactgactggtgcgttggttattgtcaccgggatggtgatgggaaatatcgccgattatttcaatctgcctgtttccagtatgagtaataccttcaccttcctcaacgccggcattttaatctctatcttcctcaacgcctggctgatggaaatcgtcccgttgaaaacgcagttacgttttggctttctcctgatggtgctggcggttgccggtttgatgttcagccacagcctggcgctgttcagcgcggcgatgttcattctcggggtggtcagcggcatcaccatgagcattggtacattcctggtaacacaaatgtatgaagggcgtcagcgcggttcccgcctgttatttaccgactccttcttcagtatggctgggatgattttcccaatgatcgccgcgtttctactggcgcgcagcattgagtggtactgggtttatgcctgcatcgggctggtgtatgtcgctatttttattctgaccttcggctgtgagttcccggcgctgggcaaacatgcgccaaaaacggatgctccggtagagaaagaaaagtgggggatcggcgtactgtttctctctgttgcggcgttgtgctacatcctcggtcagttaggttttatctcctgggtgcctgagtatgccaaaggcctgggcatgagcctgaacgacgcgggcacgctggtgagtaacttctggatgagttacatggtcggcatgtgggcgttcagctttattcttcgcttctttgatttgcaacgcattctgaccgtactggctggtctggctgcgattctgatgtacgtctttaacaccggaacaccagcacatatggcgtggagtattctcgctctgggcttcttctccagcgcgatctataccaccatcatcaccctgggtagtcagcagaccaaagtaccgagcccaaaactggttaactttgtcctgacctgcggaaccatcggtactatgttgacctttgtggttaccggcccgatcgttgaacatagcggtccgcaggcggcactgcttacagcaaacggtctgtacgctgtcgtctttgtgatgtgcttcctgttaggtttcgtcagccgtcaccgtcagcataacaccctgacctctcattaattgctcatgccggacggcactatcgtcgtccggccttttcctctcttcccccgctacgtgcatctatttctataaacccgctcattttgtctattttttgcacaaacatgaaatatcagacaattccgtgacttaagaaaatttatacaaatcagcaatatacccattaaggagtatataaaggtgaatttgatttacatcaataagcggggttgctgaatcgttaaggtaggcggtaatagaaaagaaatcgaggcaaaaatgagcaaagtcagactcgcaattatcggtaacggtatggtcggccatcgctttatcgaagatcttcttgataaatctgatgcggccaactttgatattaccgttttctgtgaagaaccgcgcatcgcttatgaccgcgtacacctcagctcttacttctctcaccacaccgccgaagagctgagcctggtgcgcgaaggcttctacgagaaacacggcatcaaagttctggtcggcgaacgcgctatcaccatcaaccgtcaggagaaggtgattcactccagcgccggacgtaccgttttttatgacaagctgatcatggcaaccggttcctacccgtggatcccgccaatcaaaggttctgatactcaggactgctttgtctatcgcactattgaagacctcaacgccattgaatcctgcgcccgtcgcagcaaacgcggtgccgttgttggtggcggcctgttaggtctggaagccgcaggcgcgctgaaaaacttaggtattgaaacccacgttatcgaatttgcccctatgctgatggcagaacagcttgatcagatgggcggcgagcagctgcgtcgcaaaatcgaaagtatgggcgtgcgcgttcacaccagcaaaaacacccttgagattgtgcaggaaggtgttgaagcgcgtaaaaccatgcgttttgccgacggcagcgaactggaagtcgactttatcgtcttctctaccggtatccgtccgcgcgataagctggcaacccagtgtggtctggacgttgctccgcgtgggggtattgtcattaatgattcctgccagacttccgatccggatatctacgccatcggtgaatgcgcaagctggaacaaccgtgtatttggtctggtagcacctggctacaaaatggcgcaggtcgccgttgaccatattctcggtagcgaaaacgcctttgaaggtgctgaccttagcgccaagctgaaactgctgggcgtagacgtaggcggtattggtgatgcgcacggtcgcacgcctggcgcacgtagctacgtttacctcgacgaaagtaaagagatctacaaacgcctgattgtcagcgaagacaacaaaaccctgctcggtgcggtactggtgggcgataccagcgactacggtaacctgctgcaactggtgctgaacgctatcgaactgccggaaaacccggattccctgatcctgccagcacacagcggtagcggcaagccgtctatcggtgttgataaactgccggacagcgcgcaaatctgctcctgcttcgacgtcaccaaaggtgatctgattgctgccatcaacaaaggctgccacacagttgcggcgctgaaagctgaaaccaaagcgggtactggctgcggtggctgtatcccgctggtcactcaggtactgaacgcggaactggcgaaacagggcatcgaagttaacaacaacctgtgcgaacactttgcttatagccgtcaggaactgttccatttgatccgcgttgaaggcattaaaaccttcgaagaactgctggcgaaacacggcaaaggctacggttgtgaagtttgtaaaccaaccgtcggtagcctgctggcctcctgctggaacgaatacattctgaagccggaacatactccgctgcaggattctaacgacaacttcctcgctaacatccagaaagacggcacctacagcgtgatcccgcgttctccgggcggtgaaatcaccccggaagggctgatggcggtaggtcgtatcgcgcgtgaatttaatctctacaccaagatcactggctcccagcgtctggcgatgtttggcgcacagaaagacgatctgccggagatctggcgtcagctgattgaagccggcttcgaaaccggtcatgcctatgcgaaagcactgcgtatggcgaaaacctgcgtgggtagcacctggtgccgctacggcgttggcgacagcgtcggcctcggcgtggaactggaaaaccgctacaaaggcatccgtacgccgcacaaaatgaagttcggtgtctccggctgtacccgtgaatgtagtgaagctcagggtaaagacgtgggtattatcgccactgaaaaaggctggaacctgtatgtttgcggtaacggcggcatgaaaccgcgtcatgcggatctgctggcggcggatatcgatcgcgaaacgctgatcaaatatctcgaccgcttcatgatgttctacatccgtactgccgacaaactgacgcgtaccgcaccgtggttagaaaacctcgaaggcggcatcgattacctgaaagcagtgatcattgacgacaaactggggctgaacgcacatctggaagaagagatggcgcgcctgcgtgaagcggtactgtgtgagtggactgaaacggtcaatacgccgtctgcgcagactcgcttcaaacacttcatcaacagcgacaagcgtgacccgaacgtgcagatggtgccagagcgcgaacagcaccgtccggcaacgccgtatgaacgtatcccagtaactctggtggaggacaacgcatgagccagtggaaagacatctgcaaaatcgatgacatcctgcctgaaaccggcgtctgcgcgctgttaggtgacgagcaggtcgcgattttccgcccgtatcacagcgatcaggtgtttgcgatcagcaacatcgacccgttcttcgagtccagcgtgctgagtcgcggactgattgcggaacaccagggcgagctgtgggtcgccagcccgctgaaaaaacagcgttttcgcttaagcgacggcttgtgcatggaagacgaacagttttccgtcaaacattacgaagcgcgagtgaaagacggcgtggtgcagctgcgcggttaatgttttaacgggaggcgcaatgcctcccctttttgcatggtcctgtaataatcttcggtatattgcaggacattttttaaactttttgttttattttttgtttttattttttaaaggataatcaaatgtttacagacactattaataagtgtgcggctaacgctgcgcgcattgcacgcctgagcgcaaataacccgctcggcttttgggtcagctccgccatggcgggcgcgtatgtgggtcttgggatcatcctgattttcacgctcggtaatttgctcgatccatccgtacgccctttggtgatgggcgcgacctttggtatcgccttaacgctggtgattatcgccggttctgaactgttcaccggacacaccatgttcctcacctttggggtaaaagcgggcagcatcagccacgggcaaatgtgggcaatcctgccgcaaacctggctgggtaacctggtcggttccgtcttcgttgccatgctctatagctggggcggcggtagcctgctgccggtagataccagcatcgttcactccgtcgcgctggctaaaaccactgcaccggcaatggtactcttcttcaaaggtgcattgtgtaactggctggtttgcctggcaatctggatggcgctgcgcactgaaggggcggcgaaatttatcgctatctggtggtgtctgctggcatttatcgcgtccggctacgagcactctatcgctaacatgacgctgttcgcgctctcctggttcggcaaccacagcgaagcctacacgctggcgggtattggtcataacctgctgtgggtgacgctgggtaatactttaagtggtgccgtattcatgggattgggttattggtatgctacgccgaaagcgaatcgtccggttgcggacaaatttaatcaaactgaaacggctgccggttaattactaaggggtttttacgtggatcatttgcctatattttgccaattacgcgatcgcgactgtctgattgtcggcggtggtgatgtcgcggaacgcaaagcaaggttgctgttagacgcaggcgctcgcttaacggtgaatgcattagcgtttattccacagttcaccgcatgggcagatgcaggcatgttaaccctcgtcgaagggccatttgatgaaagccttctcgacacctgctggctggcgattgcagcgacggatgatgacgcgcttaaccagcgcgtcagcgaagccgctgaagctcgtcgcatcttctgtaacgtggtcgatgcgccgaaagccgccagctttattatgccgagcattattgaccgcagtccgctcatggtagcggtctcctctggcggcacctctccggttctggcacgcctgttgcgcgaaaaacttgaaagtctgctgccgttacatctgggccaggtagcgaaatacgccgggcaattacgcgggcgagtgaaacaacagttcgccacgatgggtgagcgtcgccgtttctgggagaaattgttcgttaacgaccgcctggcgcagagcctggcaaacaacgatcagaaagccattactgaaacgaccgaacagttaatcaacgaaccgctcgaccatcgcggtgaagtggtgctggttggtgcaggtccgggcgatgccgggctgctgacactgaaaggactgcaacaaattcagcaggcagatgtggtggtctacgaccgtctggtttctgacgatattatgaatctggtacgccgcgatgcggaccgtgttttcgtcggcaaacgcgcgggataccactgcgtaccccaggaagagattaaccagatcctgctgcgggaagcgcaaaaaggcaaacgcgtggtgcggctgaaaggtggcgatccgtttatttttggccgtggtggcgaagagctggaaacactgtgcaacgcgggtattccgttcagcgtggttccgggtattaccgcagcttctggttgctctgcctatagcggtattccactcacgcatcgcgattatgcccagagcgtacgcttaattaccggacacttaaaaaccggtggcgagctggactgggaaaacctggcggcagaaaaacagacgctggtgttctatatggggttgaatcaggccgcgactattcagcaaaagctgattgaacacggaatgccaggcgaaatgccggtggcaattgtcgaaaacggtacggcagtcacgcagcgcgtgattgacggtacgctcacacagctgggagaactggcgcagcaaatgaacagtccaagcctaattattattggtcgggttgttggcctgcgcgataaactgaactggttctccaaccattaatttaacccgggccagagaattctggccttcttaatgactctttttatatattcagcaaataaaacatagccccttaataaatattatctgctaatgggttatattcaccgttacagcgacttacaaaattaagtcattcgctcactgacgccaattaaatattcctgtatcgttcttaacgagcagtctgcttatattcatataatcaatgaatattaattaatatataatacatagggaatgtaaatgaacaaatttattaaagttgcactggtaggtgcagtactggctacgttaactgcatgtactggtcatattgaaaaccgtgataagaactgctcttacgactacctgctgcacccggcaatttctatttctaaaatcattggcggttgcggtcctactgcacagtaagtctctgacagaaatcggctaacaccggtttaattgcccgacgccctctggattttccgagggcgtatttgtttctatgtccttcttgcccccgcccgtaaaaatattttcactttaaattcaatttgataactacatccattagccacagcgcgatcctgtgcgaaattttgtgatcttcctccacattacataacatcatatgttgttatattcatcatgcattgtcatgttaccttttaaatgactgcaaactctcccctacaacgtattggacaagaaaaaggtatcgctatgggaagccaggaactccaacgcaagctcggattttgggccgttcttgcaatcgccgtcgggacaaccgtcggctccggtatttttgtatctgtgggtgaagtggcaaaagcagcgggcacgccgtggcttacggtgctcgcgtttgtcattggcgggttaattgtgatcccgcaaatgtgcgtctatgcggaactatccaccgcttatccggaaaatggcgcagattatgtttatctgaaaaatgccggaagccgaccgctggctttcctctccggctgggccagcttctgggccaacgatgcgccgagtttgagcattatggcgctggcgattgtcagcaatcttggctttttaacgcctatcgatccgttgctcggtaaatttatcgccgccggattaattatcgcctttatgttgctacacctgcgctccgttgaaggcggcgcagcgtttcagacgctaattaccatcgccaaaattatcccgttcactatcgtcattggccttgggatcttctggtttaaagcggagaattttgccgcccctaccaccactgcgattggcgcaacgggcagctttatggcgctgctggcggggatctctgccaccagttggagctataccggcatggcctctatctgttatatgaccggcgaaattaaaaaccccggaaaaaccatgccacgagcgctgattggttcctgtctgctggttctggtgctctacaccctgctggcgctggtgatttccggcctgatgcccttcgacaaactcgccaattctgaaacgccgatttccgacgccctgacctggatccccgcactcggcagcaccgctgggatctttgttgccatcacggcgatgatcgtcattcttggtagcctttccagctgcgtgatgtaccagccgcggctggaatacgcgatggcgaaagacaacctgttctttaaatgcttcggccatgtgcatccgaaatacaacacgccggatgtctccatcatcctgcaaggggcgctggggatcttcttcatcttcgtttccgatctcaccagcctgctgggttatttcaccctggtgatgtgtttcaaaaataccctcaccttcggctccatcatctggtgtcgtaaacgcgacgattacaaaccgctgtggcgtactccggctttcgggctgatgaccaccctcgccattgcgagtagcctcattctggtcgccagtacctttgtctgggcaccgattcccggccttatctgcgccgtcatcgttattgctactggtctgcctgcttacgccttctgggcgaagcgtagccgccagctcaacgctttgagctaatgttatctggagaaaataaaatgttggatattgataaaagcaccgtggactttctggtcaccgaaaatatggttcaggaagtggaaaaagttctcagccatgacgttccgctggtgcacgccatcgtggaagagatggtgaagcgcgacattgatcgtatttatttcgttgcctgcggaagcccactcaacgcggcgcaaacggcgaaacatctggcggatcgcttttccgatcttcaggtctacgccatttccggctgggagttctgcgataacaccccgtatcgcctcgacgatcgttgcgcagtaattggcgtttctgactacggtaaaaccgaagaggtaatcaaagcgctggagctgggccgggcctgcggcgcactcactgcggcgttcaccaaacgcgcggatagcccgattaccagcgcggcggaatttagcattgattatcaggccgactgtatctgggaaattcacctgccgctctgctacagcgtggtgctggagatgatcacccgcctcgcgccgaacgcggaaatcggcaagatcaaaaacgatctcaagcagttgccgaatgcgctcggtcatctggtacgcacctgggaagaaaaaggccgccagcttggtgaactggccagccagtggccgatgatttataccgttgctgcgggtccgctgcgtccgctgggttacaaagaaggcattgtaacgctgatggaatttacctggacgcacggctgcgtgattgagagcggagagttccgccatggcccgctggagattgtcgaaccgggcgttccgttcctgttcctgctcggcaatgatgaaagtcgccacaccaccgaacgcgccattaactttgttaaacagcgtactgacaacgtgatcgtcatcgattacgccgaaattagccaagggctgcacccgtggctggcaccgttcctgatgttcgtgccaatggagtggctctgctactacctgtctatttacaaagatcacaacccggatgaacgccgctattacggtggtctggtggaatattaatccctctcccggcccggcaacgggccggatttacgcaaggagttacccgatgaaaacaggtatgtttacctgcggccaccagcggctgcctattgaacacgcatttcgtgatgcaagcgagctgggttacgacggcatcgaaatttggggcggtcgcccgcacgcgttcgcgccggacttaaaagcgggcggcatcaaacaaatcaaggcgctggcgcagacgtatcagatgccgattatcggctatacgccagaaaccaacggctatccgtataacatgatgctgggcgatgaacatatgcgtcgcgaaagcctcgacatgatcaagctggcgatggatatggcaaaagagatgaacgcgggttatacgctgatttccgcggcccacgcgggctatctcacgccacctaatgttatctggggacggctggcagagaacctaagcgaactgtgtgagtacgcggaaaacatcggcatggatctaatcctcgaaccgttaacgccgtatgaaagcaacgtcgtgtgtaatgctaatgatgtgcttcatgcgctggcgctggtgcctagcccgcgcctgttcagcatggtcgacatttgcgcgccgtatgtccaggcggaaccggtgatgagttatttcgacaaactgggcgataaattacgtcatctgcatattgtcgacagcgacggggccagcgacacgcattacattcctggagaaggcaaaatgccgctgcgggaactgatgcgcgatattattgagcggggctatgagggttactgtacggtggagctggtgacgatgtatatgaacgagcccagactctatgcccgccaggcgctggaacgctttcgcgcgctgctgccggaggatgagagatgaaaaccctggcgacaatcggcgataactgcgtcgatatctacccgcaactgaataaagcgttttctggcggtaatgcggtcaatgtggcggtgtactgcactcgctacggcatacagccgggatgcattacctgggtgggtgacgatgactacggcacaaagctgaagcaggatctcgcccgcatgggcgtcgatatcagccatgtccatacgaaacacggcgttaccgcacaaactcaggtggaactgcacgacaatgatcgcgtttttggcgactacaccgaaggcgtgatggccgactttgccctgagtgaagaggattacgcctggctggcgcagtatgacattgtgcacgcggcaatctggggacatgcggaagacgcattcccacagctgcacgctgcgggcaaacttaccgctttcgacttctccgacaagtgggacagcccgctctggcagacactggtgccgcatctcgattttgcctttgcctccgcaccgcaagaagacgaaacgctgcgtctgaagatgaaagcgattgttgcccgtggcgcaggaacagtgattgtcacgctgggtgaaaacggcagcattgcctgggatggcgcgcagttctggcgtcaggctcctgaaccggtgacggttatcgacaccatgggtgccggagatagcttcattgccggattcctttgcggctggtctgcggggatgacattaccgcaggcgatagcgcagggaacggcgtgcgcggcgaaaaccattcagtaccacggtgcctggtaagtataacgttggcgtgagcatcttcacgccaacgtgctgttacttgccggaaaacgaccctataatccgagtaattcattctttatttcagggtcgattatgagtgctacggaccgctactctcatcaactcctctacgctaccgtccgccagcgactgctggatgatatcgcgcagggggtttaccaggcgggcaacagatccctaccgaaaacgagctttgtacacaatataacgtcagccgcattaccattcgcaaagccatcagcgacttagtggcagacggcgtactgatccgctggcagggaaaaggcacctttgtacaaagccagaaagttgaaaacgccctgcttactgtcagtggttttaccgattttggcgtcagtcaaggcaaggcgacgaaagagaaagtgatcgaacaggaacgggtcagcgccgcgccgttttgcgaaaagctgaacatccccggaaacagcgaagtgttccatctctgccgggtgatgtatctcgataaagagccgctgtttattgatagtagttggatcccgctgagccgttatcctgactttgatgagatttacgtcgaaggaagctccacctatcagttatttcaggagcgttttgacacgcgagtggtcagcgacaaaaagaccatcgatatctttgccgccacccgcccgcaggcaaaatggctgaaatgcgaactgggcgaaccgttgtttcgcatcagcaaaatcgcctttgatcagaatgacaaaccggtgcacgtctccgaactcttctgccgcgccaatcgcatcaccttaactattgataataaaagacattaaccgtaggccggataagatgcgccagcatcgcatccggcgatgctggcgcgttgaattttacatcccgtacgttcccctcaccctaaccctctccccaaaggggcgaggggaccgttcagtacggaatttagcttgacggtgctatccagcattaaatactggcaatactctcacgcaaaatccgcagcaccgtctcttcaccgctgcgattcgggttaatgcgaatcgcacaatgttcactttgtggattcgcctggcgaaacgttccggaaaggcgataaaagagcggcgggatttcatatttgctctctgcacccaccgggtaaggcaaggcaccgcgcttttgcgcctcttccagcactctggcggcaatcggctgatgaaactcgacaatcaacaccttgctctgcgcattagcaatcaccgcgcttttcacttccggcaccgcaccaccgttaagcaaagccagcaaccgttcagatacccctgcctgcaccgcgtgcatcactggcgcaaacaccagaccacgcaatacttccagcgcctgtgcgccctggatctggctaccgccggagtaaagcgtggcgcgaatacggttgataacatcagcatcgccgaccactgcaccaacaccctctggcccaaatagcttgaagcaggaaaatgtgctgacattcgcgccgcattcacagccgattcgagccaccttcatcaccgcatagttgtcatcggttaacgctggaacacctgccgcgcgcaacgttgccagcacatctgccagcacgtagctgtcctgcggctgctggcgcgtatgctgcaccagcgccgcatccggttgttgctcgtcgacgacctgcttcagtgcgctcaggtcattgaaatcaacagtaataagcgtcagccccatctgctcaataataacccgtgtcgtcgggtaaacaggcgcgtcatgcaccagaagacgctgccccggtttgagcaaagccgccagcccggcgcgaatcgcgccagtccccgcgtcctgcaccagcgccgcagcctgtgcgtgaaatgcatcagccagcacctgttccacacgctgggtaacgcgcggttgattcagtcctggcgttaagcctaaatcaccgccagtaagaaactcgctgccggggaaatggcgacaaatgctatccaccagcgcaaactgcttttgctgcgcctcaataatcgtcaggctttgcagaggaaacgtcttcataggtgccttccttaagccggaacgaacaggccaagccagtaaagaacattcagcagaataccggtgatcattactgccacgaccggtgccgccattttctgtaccggacggcccagggattcgttgaggaagtaaatggcaaccgcgatagagaatccggtataacccgccatcttaattgctgcgaaaatgctaccgaccagcagcgccacttccatcagcatattcatggcgttacggatgttatcgctcgcattacgcacgctcgggtagcgtcccagccatttgccgatgctacgaagcagcaagacttccgcgctaataaccactgcgcctaataccgctgcaaccatcggattcgggctgagatagtccaccgcataaacaaaggtaaagcccgcaactgcatacacacccgttgctaacgcggtggtggcaatcaacggcacaaaccccagtccgcgcataaattctgccagagccgcctgattaatcagcgtttggctttgttccggcgttacgcctgcggaatatgctttctccagtgtgaagatgctcacttcactgccagcaaaaatcttcatgctggcaacggcggcaatcaatgctcccacgatggcgatatagggtaagtttttgataatccgactcgtgcgttcttcaaacacgctaagcccgctggcatcaatgtcattttcatcacgatgacgcaggtcgtgagttatcgcgatccccagcagcatcaccatgccaataaagatttcgatggattcagggttaagatgtgggaaatagcgcacgactaccacacgggtcatcagtaccaccacggcggcgatcagactttgcttccagccaaactggtagaaaatcgccaccagcgggaacagtgcaaaagcactaaccaccgggctgcttaattcccccaggctacctaatacatccaccggcagcgcggtcagcagctggtttactggcaacaggcaagtaaggatcaacacgccccagatagcgccaagaccaaacgccatcaggctgtttatcgccaggacgccgaggatatcggtaggaagaaagagtaaccatgcgttgagcagcccggttttcagggtaaaagagatccccacgctggccacaaaaccaatgctcagaccaaaagcgatactccccgcctcgcgacggttcatatagccttcaatcagttgcggcaggatcgggcggatgccgtcatgaaaaacagccgcgctgcgatgcgccagaaggcttgtcatacccgtcaggcacgccaccacgataatctgaatatacagatccatagtcgtgccttttatttcagatggttaatcagcatcggaatcgcgtgttcgacgtgctcaacggaaaggccaaacgccacttttccttcagcgatcattttggcgatatgctcgtctttcgctttaatgcctggtttggcaatggtgcaacttttgttatagcctatcaccgcgatggcaatgctcaatgccgcgcccgcaccggtattacacgcgccgatgtaataatccagttgcccggatttcaccttcattgccgcttccatgtcgttgtgaatgaaaacttcaaaacagccaggagccgtcgcttcaatagtttttttaatctgctcacgctgtaagcctgcaacgccaatctttttcatgagtctgtccttattggaaaaattgagagggattttcacgtaacatcacatccacatcggcctgactgaatccactctggcgcaattgcggaataaaggtggttagtaaatagtcatagccataaccaccgttggcttttaaatgggagcggcgcgtaatatccatgctcagcatgacgcggttcagcaacccacggtcgcgtagcgcatgaagcatcgcaatacgcttttcgtccgggtagtaactgttcttgccgatggtgtcgaactgcacgtacgcgccgagatcgatcatcttcaaaatgttgtcgaggttgtctttcagatcgcagtgaccaacggtgacgcggctaagatcaaccccgtgggcttgtagcaacgccagttgctccagccccatcgtgctgaagctcgtatgcgtggagatcgggcgtccggtctggttatgcgccagcgcagcggcaataaataccttctcttccagcggcgtaatctttccttcgctggtgccgatctccgcgatgatcccggctttcagctccgtgccatcgataccctgttcaatttcatcgaccatctcctgcgccagttcctgcacgctgcgggtcgccacatgttccgggaaaaacgcgtcctggtaataaccggtacaggccaccacgttgatccccgtctcgcgcattacatcaagcataaattgcgcattgcgccccatgtaacggttggtcatctcaatcacattacgcacgccccgggtcatcaggtcgttcatctcctggcaaatgaacgcatactgatcaaggcggcagtccacgttgtttttaaagccggagagatcaatatgcagatgctcatgggcgagggtgtaacccgtcggatcaaaactcatagggtgtctcctgcaaaccggagggaggaaagaaaagagcgaccattttgtggcggtggcgcgcggaaaaattcacacacggtagcccccacatcagaaagcgtggtgcgcacaccgagctgcgtagcgatcatcccttgctgataaaccagcactggcaccacttcgcgggtatggtggctgtgaccaatggtcggatcgttgccgtgatccgccatcacgaccaggcaatcatctggctgcatcgcctcaacaagccgggcaaggttacggtcaacgacctgcaaacgttcggcataacgtgcgacgtcttctgcatgaccagcgaggtcggtttcctgaatgttggtgcaaataaacgccgtcggatgggtgttaaattcgttgagggtgatatccataatccgctggctatccaccagattttgccagctcacgccataaggattgttgacgatatctgccaccttacccaccagcacggttggcacgcctgcttcatacagtttttgtggcacctgcactttttcatcgacgccatagcccatatgcacgacctggaaaccgttgtcataagcgccagaacgcggcgcattgataccaataaagcgcccttctttgctttctgcggcatcgagaatgcgttgactgtcggttaacaggccaccaaatgtaatgacccgaccgacctgtacctgctcacgcacgatacgaccaattttgattgcgtcgtcaaaagagatcacagagagattggcggtaatgttatagacctggcctaaatccgcctcgagattatcgccaatcgcaaccgcctgattgacccacagaaattgcagatcatcgccacggcgctccacctgccagccagcggaaactaatgcctgctcaacacggtcaatcacatcgcgaaaaggcatccgcagcggcggtaacgggcgcgtgcctaaaatttcctgatgccccataaaggtatcgccaccttcatgttgcagctctgccacgccccaggttgcggaatcactcggctgcatatcgcctggcgcataacccaatgcgttgattagccccagcgtctccagcgttggtagctgcaaatgcggcaactggctcaggatgtgaccacatgtattcgctcccgcatcttgcggacgcaccagcgtgacatctttcattgcccctacgccaaagctatcaatcactaacaccacaaatcgcgccattacgcccccagagagtttccaagactgtcataacgaccgacgatttccggttcgccacgatgaataccggacaccagcaccacatcgctacgggtgacaaaaatctgcgtgcgaaaacagagcaccactgcactgcttaccggaaactcgcctgccagcggcagggtgtagtcgatactgctgtcatccacagttttgagattggtttcagtaatcttttgattttctggcgtaaacaccaacgcatgttgcgcatgaccacgacgatagtaaccgccgccgtagcagtagctgtcgccacggaaatgatgggagatttcacttaaccagagcatcgcgatacgttcaggctgatcgccctgctggtttgccggaatagtgcccgtcagcgcatgaccgggttcggcatgagtcacaccgtattgcgccagtaatggcaggctagtgcagctggtcgcactaggcgcgttcagttgctcaagtgcaataccagatttcgccagttgatcccgtgcctgtatcagcgtgtgaagattcggtgtcggcaaaacttttccgacagcctcatcccaaagcaggcaagggaaatgggtaagtccggctaaatgcagccctggcagattctggatttcggcgacaatctccggcaacaccttgagggcaaaaccgctctcctggcccggataaagaaaatcatcgtcgctataaactttaagcagcacagactggattcgcccggccttcaccgccgccgcagaaacttcccgcgctttgtcgagagtaaacacggtgatgacgtcggtgccctgttcaacggcgtcagcaacctgatgacaagggatttgtaccagatgcccctgatgcgccacaggcaaaccagcgcggcgcatgactcgcgcctctttgtaatccaccgccacaatgccgctgtagcctaatgccagcaatttttccgccagccacggattacgaccaaactgcttggtcatcagatacagttcaatgccgtaaagccgcgccgtctcaatcagccgcttaccgttttccagtatctgatccacgtcgatcacccagctgtccggggcgatcttgccctgctgccacaggcttagtgcggcggaaatcagcgccgggttctggcgtttcaatgcttctacaaacatcttgttgcctcgtttctgttccttgaattaaatattcatttttttgaatatttaggttgtgcgacgtggatttgtcgggagcttcaaacctcttcgttagcagccatccataatccataaaggttggccagcaaatagccttcttcacacgggttaacttccagtgcgaattccttcaacaacacctgatgcaattgcacaacggcttgccagtggctggattgcgccagttctgccagcaactcgttatccagcggctctatttcttcaccacggcgactgcgcatcagtgcactcgccatatgtgtcatcgccatcgttccttgctcactgcgcaccggcagatggcactctgtttccagtacgttgacgacctgcatcatgcctttgcagatgtccttatcaataacgcctgcctcgcaaagcaggttgagtctggtttccatatcagatgcctttcgtttaataactcggttcctgttccccactcactacccgttgttgatgggcgagcagggcgtgtttatctacaacggcacgcagcagttgttgcattgggtaatcatcgactcgcgtcaggaccacggcttcggtggcctgtaaaaatcgcggatcgtctgtgagcggcgtcgcctctaatcccagcatggtcagttcgttttccgccaccacgttccagatcaccgcatcgacatcgcctttaacaatgcgttgtaaactctcgtgataagagagatcgactcgttccacatcactaccgccaaaaaaaacatcggtcatgattttctgatccgcgctacggttatccagccccacgcgcttcacgtttgcggactcgcctttacggcaaatcaactggtgctcgccaacgtaggtgtgcggccccaactccagcgcgaggcataagcctttttgcgtgagataactttccgccgctagtcggctaaccaccgccatgtcatacacgccattaagcagacactccacgcgaatatccgcgccacgcatgtgcgcatagtaaaaaggaatgccatcaaactgggctttcaatccgctcgccaggccttcgtacaaacgggtatagggcaagggcattgcacataccacgttgttgatatccacatgagtcagcaatgctttgttatccatctcgaccagataactgccattgcgcccacggcgttcaatccgtatcgctccgctactttccagcgttttcaacgcggcctgcgtcaggccaacggaactacggcattcatttgccagctcatctatggttttcaatcgattaccgcacttttcacccaacaaataacgggccagcgtcgtgatgacgacgccttcttttttgataaacgttcgacgcataataaattttcagtaaattgaatatttatatcttcaggaatttgaagataaggcgcaacagcgagatgtggaaacggcgaggcacttcacattttttcggattattgcaaatgaggataaaaaaaccgggtttccccggtttcagagtgatgataaaagcaaaattgcctgatgcgctacgcttatcaggcctacatttccttgcaatatgtgcattactttgtaggccggataaggcgttcacgccgcatccggcatgaacaaagcgcaatttgccagcaatagtgaattacggcttcgccacaaaaccaatcgcttcgtacaccgcttttagcgtacgggaagcgtgcgcgctggctttttccgcgccatctttcatcacctgttgcaggaaggcttcatcgttgcggaaacggtgatagcgttcctgcaattcagtcagcataccggaaacggcatcagccacttcacctttcagatgaccatacatcttgccttcgaactgtttttccagttctgggatgctctggcccgttaccgcactaaggatatccaacaggttggaaacgcccgctttgttctgcacatcgtagcgaactaccggcggctcgtcggagtcagtgaccgcacgtttgattttcttcactacgcttttcgggtcttccagcaggccgataacgttattgcgattatcgtcagacttggacatcttcttggtcggctccagcaggctcattacgcgcgcgccagatttcggaataaacggctccggcaccttaaagatctcgccatacagcgcgttgaaacgctgggcaatatcgcggctcagttcgaggtgctgtttctggtcttcacccaccggtaccagattagtttgatacagcaggatgtccgctgccatcagcaccggatagtcaaacagaccagcgttgatgttctcggcataacgcgcagatttatctttaaactgcgtcatgcgactcagttcgccgaagtaggtatagcagttcagtgcccagcctaactgtgcatgttccggcacgtgggactgaacaaaaatggtgcttttctcaggatcgataccacaagccagatacaaggccagcgtatccagcgtcgctttacgcagcttctgtgcatcctggcgcacggtgatcgcgtgttggtcaacgatacagtaaatgcaatggtagtcatcctgcatgtttacccactgacgcagcgcacccatgtagttaccaatggtcaattcaccactgggctgtgcgccactaaaaacgatgggcttagtcatttttgctttcctgattttcgctatgcggaagccctaatgcgggcagaaggtcatttatagactgataaattacatcaggctggctgagatcgatagcctcgccgtagttatatccgtaggttaagccaacacttgggcaacctgccgcttttgccgcctgaatatcattgcgactgtcgccgacaaacagcatctgttgtggggcaattcccatccgctcagccaccagtaacagcgggtccggatgcggttttttgttttgcacatcatcaccaccaatcaccacgctgaagtatttggcgatatctaaggcttcgagcagcggcgcgacgaacggcgtcggtttgttggtgaccaggcctagcggcaggcctttagcctgcaacgcgcccaacgtatcggcaacgtgcgggaacaaaaacgtcccctcttcggcaacctcgccatagtagcgatcgaacagtttacgcagaatacgtacctgttcttctgccggaatgtcgtcatcaacgggcggtttacccattgttttacgctgagtcgcacgttcctgacgcgcccaggtcaatgcgcgctccatcagaacatctgcgccgttaccaatccaggtaataacgcgttcttcacctgcgacgggcaactccagcgcatacagcgccatatctaccgcagcagcaagaccaggagcactgtcgaccagcgtaccatcaagatcaaaagcgacgccgcgaatatcttcaaacttattcatgacttacctttgccagttcactgcgcatttcatcaatgacttttttgtagtctggctggtcgaagattgcgctaccggcgacgaacatatccgcgcccgccgcagcgatttcgccaatgttgttcaccttcacgccaccgtccacttctagtcgaatgtcaaagccagactcgtcgatacggcgacgtacttcgcgcagtttatccagtgtttgaggaatgaaagactgaccgccgaaaccagggttgacggacatcagcaggatcacatccagcttatccatcacgtaatccagatagctcagaggtgtcgccgggttaaataccagacccgctttacagccattttctttaatcagttgcagcgtgcggtcaacatgctcggaggcttctggatgaaaggtaatgatgctggcaccagcggcagcgaaatcaggcacaatgcgatcgacgggtttcaccatcaggtgtacgtcgataggggcggtaatgccatagttacgcaaggatttcagcaccattggcccaatcgtcagattgggaacatagtggttatccatgacgtcaaaatgcacgacatcagcgccagctgccagggcttttgcggtatcttcacccaggcgggcaaaatcagcgctcagaatactgggggcaatcaaatactgtttcatccgcttctccttgagaattattttttcgcgggactaacgactcctggtttgtacaaagccagcagttcgtccacctttttacgtgtgccgccgttgctgcttatactgcgtcgaactttgacgacatgcaattttgcgcgctgataccactcacgcgttaacatcgtatcgtgattggagatcagcactggaatatggcgctcaaccagaccttcggcgatctccgccagatgcgcttgttgttcaagcgtaaaactgtttgtgtgatacgccgtaaagttggcggtcgcagacagcggtgcataaggcggatcgcaatagacgacggatgcatcatctgcgcgcgccatgctatcggcgtaagactcacaatagaaaaaggcattctgcgctttttcagcgaagtgatacaactctgcttccgggaaatagggttttttgtagcggccgaacggcacgttaaactcaccgcgcagattgtaacgacacaggccgttgtaaccgtagcggttcaaatataaaaacagtaccgcccgacggaacggatcctggcttttgttgaactcttcgcggaactgatagtaaacctcggcgcaatttgtttcgggaacaaacagctcgcgtgcggcctgtacgtactcatcagtacgcatcttcacaatgttatagagactgatcaggtcgctattgatatcggcaaggatataacgagaaaagtcggtgttgagaaacacgctcccggcacctacaaaaggctcaaccagacattcgcccttgggcaaatgccgtttaatatcatcaagcaggggatacttgccccctgcccacttcaaaaaagcgcgatttttcttcatgctgactaactaattacaccttctccggctgtggagaaagctccgacagcatccagcgcttcaggcaactcccgcaacgataaaccattgcgggagataaccttgattacttcagatcggcctgtacctgacgcagcggtttcgcccacgggtttttggcctggacatctgctggcaatgtagataccgcttttttcgcctcttctttgctagcgtacacgccagaaaccaggacataccacggctgaccattacgcgtcgtttcatagacaacgtagtttttcagattctctttcttcgcccaaccgttcaggttgtcgtagttagaggaactgctcagctgcagagtgtaatggctggacggtgcgcttttcaagctaccaacattacctgcggtcttcgccccagcagcgggtgttgctgtggtttgcgccggggatgccgtctgtactggagccgtagtcgccgtctcttttggtgctggcgtagaagtcgcagccggtgccttcgtgctcgccacaggggcagctggttcagtacgcttcggcgtctgtgctaccggcttcggctccgttttcacggttgcttgcggttttttcggttcaatcaccgcctgctgacgagctgggcgcgtagtggacggacgttcagcggtttgcgttttcgccgtgtcacggcttgcattgccattgcgaacaggcgcaaccgttgcgggttcagtcggcaacgtggaattgaccgccacattgttcagctgttgctgattttgtggctgggtcagcgcattgttcaggtcaccctgcacttcaacacgttgttgaccatccgttgccaccggggtttgcccttgagtcggcgtagaagagatcggtggcagagaaacatcctgctgagtattttccgcagacgtggttcccggcgctggctgcacgccattcgcctgatcggtcgcattgccagcaagatcaatactcttctcgccagacgcggtttgatcgctggaagtggtgctgggggcttttagcgcagaaccgataccgatgatcaacagcagtagaaccagaatgccgacgcccatcatcatatactgacgagaagcgggtttactggctgcttttttgcgcttacgcggacgacgctctacgcgctcttcatccacggtttcatcttcggattcgtcaatttcttcttcgatttccggttcctcattgcgctctttttgcgcacgagtcggacggcgatcgtcagtgtcatcaagttcaatatcatcaaaattgatctgcggttcgccacgttcagtacgctcagaacgttcagaagattgacgagaacgaccagtacgacgatcgctgggatcgggtttcagctcgtcttctggtttgaattcatccatttaacaccccactaaaaggttaatgcttaccacgttgcaattaacctgaagctaatagaccgcttgataagcggcctgacctttcttgttgttacgcactttgacaatcggcaatggcgttaagaacaagctcgtggctaacgccgctgcgaacttcactcttaccaattgccaacggaagaattaagcgcatctctcccgcaaggactttcttgtcacgcagcatatgcggtaaatacgcctgcgcggacatttcgcgcggcccattgaccggtaacccagcccgcttgagcagggttataatacgctgcgtttcggcagaactaaactgcccgagacgttcgctcgtccgcgccgccatcaccatacccgcagcgaccgcttcaccatgtaaccaattgccataccccatttcagcttcaatggcatgaccaaaggtgtgtcccagattcagtaaagcacgtaacccggtttcgcgctcgtcggcggcgacaacttctgccttcagttcacaacaacggcgaatacagtacgccattgccggaccgtccagacgcaacaacgcatccagattctcttccagccagttaaaaaacgcaccgtcaagaataatgccgtatttgatgacttctgccagcccgctcgctaactcacgcgggggaagcgttttcagacagtcgagatccaccaccacactagcaggttggtagaacgcgccaatcatgtttttaccgaggggatggttgaccgcagttttgccgccaacggaggaatcgacctggctcagtaacgtcgtcgggacttgaatgaaacggacaccgcgctgataactcgccgccgcgaagccggtcagatcgcccactacgccgccgccaagcgccaccagcgtagtatcgcgaccatgcggtttttgtaacaacgccgtaaagacggtatcgagtacagccaggcttttatactgctcgccgtcagggaggataacgctatcgacgttaacacccgcctgttcaagtacgccgcggaccttatcgagatacagaggagccagggtttcgttggtgaccaacatgacctgctcgccgcttttcagcggtaagaaactagctggttcattaaacaaaccagatgcgatggtaattgggtaactacgttccccgagagtaacgacaatcctctccataacgcgacatccaccttaattactgtacccgcagacgagtgtatataaagccagaattagttgctttccagcatgtgaataatctggtttgcaaccactttagcgctttgatcatcagtacgaatggtcacgtcggcaatctcttcatacagcggattgcgttcattggccaacgcttccagaacttcacgcggcggtgtttcaacgtgcagcaacgggcgttttttatcacgctgcgtgcgtgcaagttgcttttcgatggtcgtttcaagataaacgacaacgccacgagcggaaagacggttacgcgtttcacgggatttcacagagccgccgccagtagccagcacaataccctgtttctcggtcaactcattgatgaccttttcttcgcgatcgcggaagccttcttcgccttctaaatcgaaaacccagcccacatcagctccggttcgtttctcaatctcttgatcggaatcgtaaaattccatattgagttgttgagctaactggcgcccaatagtgctttttccggcacccataggcccaaccagaaagatattgcgtttctctgccattttttcggtactactaagactattcgttaatgataaacccgcttcgctcagagagcgccgcaggacatgaactgaaacctcataagatattgcgagagtcagactgaaaattatctcaatactccagcgggtttggcaactgaataaatcacccatccctctgcatatctggtcgctgcaagcgcgctgccttgctaccaccgctctggcgataaatcaccgggtaagattagcgtaaaaaagacagcaaaatgccgcctgaatgataaatcatcatcatggaacgcaggcagcgaagagcaccaactctcaaatcggtactccttgtatgctaaatacctgcgcgcgtcaaatagatgaaacacgttcagcgtaaaaacattaccgcttttacggctgtttactcactggaaaccagtcgtggcgtgataaacaccactaactcgcgtcgttcatcttcttttccgtcatgacgaaatgattgcccgaaccagggaatgtcgccaagcaacggtacgctatcctgaccgcttttatttttacgggtaaaaatgccgcccagcgccaacgtttctccgcttttgacctcgacctgcgtttcgatctcctgcttatcaatcgccagcacttcgccatcggcctgctgtagcacctgccccggaacgttctggctgatgtgtaatttcagccggatgcgacctttttgtaacaccgtgggcgtgacctccatccccaggacggcctctttaaattccacgctcgtcgcgccactttccccgctggaaacctgatatggaatttcgctcccctgtttaatgctggcaggctgaagatgactggccagcagacgcggactggcgataatatccagctgctgtttttgttcgagcgcggaaagctcaagatccagcaagcgtccgttgatgcgcccaatgttaaaaccgacatgcgttgtcgccgtcgctacggagaggtcgctaccaagcgtggtgacttgcccaacgccaccagcgtgttgcgcatcggccagcgtccatttcacgcctaactcacgcaaacttttttcattaatggtgacaatatgcgcgctcagctcaacctgcccgaccggcagatccatttgcgctacccactgttcaagcgcgcttaacgccgttttgttatctcgtagcaaaaggcgattggtgcgtttatcgacggtcatactccctttggcactcagcagcttctcccccgctttcgccagttctcccgcgtcggcgtattgcagggttatactgcgattttccagcggcagatttgcctgcgcccgcgcctgctccgcctcctggcgggcgatattgttattctgccaggcaatggaatgcacactgagaatgttgccttcctgccgcgttatcagtccggcgcttttcactacagtttgtagtgcctgcttccagggaacatctgttagatgtaagctcaccgtaccgctgacgtctgggctcacgaccaggttcaacttctcctgttcagccagcgcctgcaacacctgagctaccggaacgtcatccaccatcagcgtcactttttgcggctttgccgcctgtacgccgggtatcagcatcaacagtagtgcggctatccattgcttcatttgtatctccttgccgttgccacaaccattgtggcggttcgcagtttgtcccggtacccagcgttagtacgtctggcgtcagctgtaaaattgtccagccgttttccagcacatcgttttgctgcacccgtcgccatttcttttgcccgtcttttattacaccgatgatgcgctcgcctcgccctaccatcccctgatagcgccactggctaagttcgctaatccggcatagatcttccggcggtttaaaagggtcacgcataccggttaaaaggcacaatgcaatacctgccaacaaccagcgtttaaccctcatgcggcgtctccagttgtagcgtgaacaaaagatcatcaccttccacgcttaagctaaaacggctcacgctgacgttgcgctctgccagccgtgtaaatgcgctcggcactgcttcccacagcgttttcaacgccaactcgcctccctgcgcggatggatgccaggaaaccagttgcgcgccggataactgaaaatccagtgggctaaagggcagcgttttttcctcgctgaagggagcggtgtctaccaggcgatacagtgcggcccactgctggtgatgacttgcccgtagtcgaattaatgcgtcgcgctcttcatggtgtgtgctactcagaaaaatgagcgtaactaacatcagcaaccagaatgcccagcaaagctggcggaggcggggacttgtggcgaaccaccagtcaaagaacatgttcatcgctaaccttccttgttaactgatactcaaattgccagcgtccctgcgcatcctgctgcgtggctccccgctgattgagatgaaaagatgcatcctggcggagactcgtttctagtgcgtttaacgcggtaatgcttgttgtcagccccttgatctccagcgttccctgctgccagcttatcgttgtcagccaggcgtgctcgggtaaaagcgccgccagtgcttccagcgcagattgccagtcgcgggtaaattgtcgctggcgctgccgttggctacgctgttcgcgtaactgctgttgctccagcaaacgtggcttcgttatctgtaagctgcgggcgagttgttgttccgcctgaagcaaaactgcgtctatgcgcgcttcggcgctgcctgtcagacgcagtattagcgttatcccgacggccagcagcagaggcgcaacgaacatcagcaaccagaaacgcagaaaagcggtccggcgttgctgtcgccagggcaaaaaattaattggcgggttcatcagtacgccttcccaagcgccagccccagcgcgatggcaaagtctccacctggcggcggtagcggcggctgacgaacagaaacggcctcccagggatcaaatccgccttcgccacatatcgcgacgctttcgggatcaacggataacgctgccgccagctccttcgcgctagtcatccccaccgccagtttgcgcccccagctatagcgcgtcgcccacagccactgttcgttatcacgccaggccagacattgctgatgagaaggtaaaaaaggcaggaatcgctgtaatgcactggcatccggggtgatcgcgctcacatgaacacgcaacctttctgccagagtaagcagcgttgccagctctttgctttgcgcggcagtcacgttataggcgggactgagactgtcttcgctgtaatcgaagcgcagggagtccggatccatatccagctcgcgggccatcgtcccactcagccaggccgtttgctcccgctcaccaagggacatgctcgggcgcggaaaactccgctgtaatgtgcgactggcgggaaacgccaacataatgtgatgacgctgcggcagttcgcgactccacggtaacaacgttttagccagctgctgcgcatcaacaatccgcccatctttgataatgtcgttctccagcggcaaccgccaccagcgttgcaaaaagcattcttttgcgccccgcacgatcgcaaccgctaccgcttcttgctgttgtaaatgcaaaccaatttgccagatcttaaatgccattgtgatgatctccttatcacccgtcactctgacgggtatatcaatgcgtctggcttgcctttatactaccgcgcgtttgtttataaactgcccaaatgaaactaaatgggaaatttccagtgaagttcgtaaagtattttttgatccttgcagtctgttgcattctgctgggagcaggcagcatttatggcctataccgctacatcgagccacaactgccggatgtggcgacattaaaagatgttcgcctgcaaattccgatgcagatttacagcgccgatggcgagctgattgctcaatacggtgagaaacgtcgtattccggttacgttggatcaaatcccaccggagatggtgaaagcctttatcgcgacagaagacagccgcttctacgagcatcacggcgttgacccggtggggatcttccgtgcagcaagcgtggcgctgttctccggtcacgcgagtcaaggggcaagtaccattacccagcagctggcgagaaacttcttcctcagtccagaacgcacgctgatgcgtaagattaaggaagtcttcctcgcgattcgcattgaacagctgctgacgaaagacgagatcctcgagctttatctgaacaagatttaccttggttaccgcgcctatggtgtcggtgctgcggcacaagtctatttcggaaaaacggtcgaccaactgacgctgaacgaaatggcggtgatagccgggctgccgaaagcgccttccaccttcaacccgctctacagcatggatcgtgccgtcgcgcggcgtaacgtcgtgctgagccggatgctggatgaagggtatatcacccaacaacagttcgatcagacacgcactgaggcgattaacgctaactatcacgcgccggagattgctttctctgcgccgtacctgagcgaaatggtgcgccaggagatgtataaccgttatggcgaaagtgcctatgaagacggttatcgcatttacaccaccatcacccgcaaagtgcagcaggccgcgcagcaggcggtacgtaataacgtgctggactacgacatgcgccacggctatcgcggcccggcaaatgtgctgtggaaagtgggcgagagcgcgtgggataacaacaagattaccgatacgctgaaggcgctgccaacctatggtccgctgctgcctgccgcagtcaccagcgccaatcctcagcaagcgacggcgatgctggcggacgggagcaccgtcgcattgagtatggaaggcgttcgctgggcgcgtccttaccgtagcgatactcagcaaggaccgacgccgcgtaaagtgaccgatgttctgcaaacgggtcagcaaatctgggttcgtcaggttggcgatgcatggtggctggcacaagtgccggaagtgaacagcgcgctggtgagcatcaatccgcaaaacggtgccgttatggcgctggtcggtggctttgatttcaatcagagcaagtttaaccgcgccacccaggcactgcgtcaggtgggttccaacatcaaaccgttcctctacaccgcggcgatggataaaggtctgacgctggcaagtatgttgaacgatgtgccaatttctcgctgggatgcaagtgccggttctgactggcagccgaagaacagtccaccgcagtatgctggtccaattcgcttacgtcaggggctgggtcagagcaaaaacgtggtgatggtacgcgcaatgcgggcgatgggcgtcgactacgctgcagaatatctgcaacgcttcggcttcccggcacaaaacattgtccacaccgaaagcctggcgctgggtagtgcgtccttcaccccaatgcaggtggcgcgcggctacgcggtcatggcgaacggcggcttcctggtggacccgtggtttatcagcaaaattgaaaacgatcagggcggcgtgattttcgaagcgaaaccgaaagtagcctgcccggaatgcgatattccggtgatttacggtgatacgcagaaaagcaacgtgctggaaaataacgatgttgaagatgtcgctatctcccgcgagcagcagaatgtttctgtaccaatgccgcagctggagcaggcaaatcaggcgttagtggcgaagactggcgcgcaggagtacgcaccgcacgtcatcaacactccgctggcattcctgattaagagtgctttgaacaccaatatctttggtgagccaggctggcagggtactggctggcgtgcaggtcgtgatttgcagcgtcgcgatatcggcgggaaaaccgggaccactaacagtagcaaagatgcgtggttcagcggttacggtccgggcgttgtgaccagcgtctggattggctttgatgatcaccgtcgtaatctcggtcatacaacggcttccggagcgattaaagatcagatcagtggttacgaaggcggtgccaagagtgcccagcctgcatgggacgcttatatgaaagccgttcttgaaggtgtgccggagcagccgctgacgccgccaccgggtattgtgacggtgaatatcgatcgcagcaccgggcagttagctaatggtggcaacagccgcgaagagtatttcatcgaaggtacgcagccgacacaacaggcagtgcacgaggtgggaacgaccattatcgataatggcgaggcacaggaattgttctgattaaaaaggcgcttcggcgccttttcagtttgctgacaaagtgcacttgtttatgccggatacggcgtgaacgcgttatccggctaacaaaatcgtgaaaactcaataaattgcagaaaccccataagcctgataaacattgtgcatcaggcaaacttcacgcatttacactcgcccctgccctttcaaccattcgcgcacgaggaacagcgcactgacattgcgcgcttcattgaagtcagggtcttccagccaatccatcatatgcgccagcggccagcgcacctgtggtagcggctctggctcatcgccttccagactttccgggtagagatcttgcgctaccacgatattcattttgctggaaaagtaagacggtgccatgctgagcttcttcaaaaaagtcagatcgttcgctccaaatccaacctcttcttttagctcgcggttagcggcttcgtagacgctttcacccggatcaattaatcctttgctaaaacctaattcgtaggattcagttcccactgcgtattcgcggatcaggatcaggtgatcgtccacaatcggcacaatcatcactgcttcccggttggttggacgcattcgttcataaacacgccgcacgccattgctgaactccagatccacgctctcgacggtaaacagtcgggaacgggctacagtttcaacattcagaatggtgggtttttgtaaacttttgctcatcgtgggatctatgctgtgaaatcagcggttattgtgcgatatcggacacgctttcggcaatgtgaattgcatgttatttacatttatgtaacttaataaataatcgtcctcaaatcaaattaaaagtcaataggttgaaataactccaggaatttgctgatattccgccttcagagggtttgctatgatcagcggttactgtgatgtgcttaatgatgctcaagttaaactccacgcttgccgatagccaaccgcagaatcatgtattgtgtccggtgcgactgaccacgcctgacagactaagtaagatggggaaagcatgagcaccattgtgatttttttagctgctttgctggcctgcagtctacttgcgggatggctgataaaagtgcgatccagacggcgtcagctgccctggaccaacgccttcgcggatgcgcaaacgcgtaaactcacacctgaagaacgtagcgccgttgaaaattatcttgagagcctgacgcaggtattacaggtgcctggcccaacgggagccagcgcggcaccgatctctctggcgctgaatgccgaaagcaacaacgtcatgatgctgacacacgctatcacgcgttacggcatctctaccgacgatccgaataaatggcgttactacctcgatagcgtagaagtccacctgccccctttctgggaacagtacatcaacgatgagaataccgttgaactgattcataccgatagcctgccgctggttattagtctcaacggtcatacgctgcaggagtacatgcaggaaactcgcagctatgccttgcaacctgttccgagtacgcaggcgagcattcgcggggaagagagtgagcaaatcgagctactcaatattcgcaaagaaacgcatgaagaatatgcgctgagtcgtccgcgcgggctgcgtgaagcgttgctgatcgtcgcctccttcctgatgttctttttctgcctgattaccccggatgtatttgttccgtggctggcaggcggcgcgttactgctgctgggcgcaggtctgtgggggctattcgcgcccccggcaaaatcctccctgcgggaaattcattgtctgcgcggtacaccccgtcgttggggattgtttggcgaaaacgatcaggaacagatcaacaatattagtctcggtattatcgacctggtctatcccgcacactggcagccatacattgctcaggatctcggtcaacaaaccgatatcgatatctatctcgaccgccatgtagtgcgtcagggacgatatcttagcctgcatgatgaagtaaaaaactttccgttacagcactggctgcgcagtacgattatcgctgcgggcagcctgctggtgctgtttatgctgttattctggatcccgctggatatgccgctgaaattcactctcagttggatgaaaggcgcgcagaccattgaagccactagcgtaaaacaactggctgacgctggcgtgcgggtaggcgatacattgcgtattagcggtacgggaatgtgtaatattcgaacttccggaacctggagcgcgaaaaccaatagtccttttttaccgtttgactgcagccagatcatctggaacgacgcccgcagtttgccattaccagaatctgaactggtcaacaaagcgacggcattgactgaagcagttaatcgccagctgcaccctaaaccggaagatgaatctcgcgtcagtgccagtttacgtagtgcaattcaaaaatccggcatggtattgcttgatgattttggcgacattgtactgaagacagcggatttatgttctgccaaagatgactgtgtgcgactgaaaaatgcgctggtcaatctcggcaacagtaaagactgggacgcgctggtaaaacgcgccaacgccgggaagctcgatggcgtgaatgtgttattacgcccggtgagtgcggaaagcctggataacctggtggcaacctccaccgcgccgtttatcacgcatgaaacggcgcgagcggcacaaagtctaaacagtccggcccccggcggattcctgattgtcagcgacgaaggcagcgattttgttgatcagccctggcctagcgcaagtctttacgactacccgccgcaagaacagtggaacgctttccagaaactggcacaaatgctgatgcatacgccgtttaacgccgagggtatcgtcacaaaaatcttcactgacgccaatggtacgcagcatattggccttcatccgatcccggatcgttccggcctgtggcgctatctcagcaccacattgctgctactgacgatgctgggtagcgccatttacaatggcgtacaggcctggcgtcgttaccagcgtcatcgcactcgcatgatggagattcaggcctattatgaaagctgcctgaacccgcaactgatcacccctagtgaaagccttatcgaataacacgtttgcgcggcaggttatgctaccctgtcgcgcaaattgcttcactctggagatttccctcatgcatatcaacattgcctggcaggacgtagataccgttctgctggatatggacggcacgttgctcgacctcgccttcgataactatttctggcaaaagctggtgcctgaaacatggggcgcgaaaacggggttacgccacaggaagcgatggaatatatgcgccagcaatatcacgacgtacagcatacgctaaactggtactgtcttgattactggagtgagcaactgggtctggatatctgtgcgatgaccaccgagatgggaccgcgtgccgtactgcgtgaagataccattccgtttcttgaggcactgaaagccagcggtaagcagcgaattttgctcaccaatgcgcatccgcacaacctggcggtaaaacttgagcataccggtctggacgcacaccttgatttattactttccacccacacatttggttatccgaaagaggatcagcggttatggcatgcggtggccgaagctacgggtctgaaagctgaaagaacgctgtttattgatgacagcgaagcgattctcgatgctgccgcgcaatttggtattcgttactgcctcggcgtgactaatcctgattccgggattgccgagaaacagtatcaacgccatccgagtctgaatgactaccgccgcctgatccccagcctaatgtgaaggagacgccatgaaagagaaacctgctgttgaggttcgactggataaatggctatgggctgcccgtttttataaaacccgcgcgctggcccgtgaaatgattgaaggcggtaaggtgcattacaacgggcagcgcagcaagccgagcaaaatcgtcgagctgaatgccacgctcactctgcgccagggaaatgacgaacgcacggtgattgtaaaggcgattactgaacagcgtcgccccgccagcgaggcagccttgctgtatgaagagactgcggaaagtgtagagaaacgcgaaaaaatggcgctggcacgtaaacttaatgccttaaccatgccgcacccggaccgacgcccggacaaaaaagagcgccgcgacctgttacgatttaaacacggcgacagtgaataactgtcacctgcaagagagatgattatgccgcaacatgaccaattacatcgctatctgtttgaaaactttgccgtgcgcggcgaactggtaaccgttagcgaaaccctgcaacagatccttgagaaccacgattatccgcagcccgttaaaaacgtgctggcagaactgctggttgcgaccagcctgttaaccgctacgctgaagtttgatggtgatatcaccgtacagctgcagggcgacggtccgatgaatctggcggttattaacggtaacaataaccagcagatgcgcggtgtggcgcgcgtgcagggcgaaattccagaaaatgccgacctgaaaacgctggtcggcaatggttacgtggtgatcaccattaccccgagcgaaggcgaacgctatcagggcgtagttggtctggaaggtgataccctggcggcctgcctggaagattactttatgcgttctgaacagctgccgacgcgcctgtttattcgcaccggcgacgtagacggcaaaccggctgcaggcggtatgttgttgcaggtaatgcctgcgcaaaatgcccagcaggacgactttgaccacctggcgacgctaaccgaaaccatcaaaaccgaagaactgctgaccttaccggcaaacgaagtgttgtggcgtttgtatcacgaagaagaggtgacggtttacgatccgcaggatgtggagttcaaatgcacctgcagccgtgaacgttgcgccgatgcgctgaaaacgctgcctgatgaagaagttgatagcatcctggcggaagatggcgaaattgacatgcattgtgattactgcggtaaccactatctgttcaatgcgatggatattgctgaaatccgcaacaacgcgtctccggcagatccgcaagttcattaatgagtatgtccggcagagagggctctgccggattttacgactaatacacctgatgcgctttgtcactcattcagattcacattcagcctttcaccatccactacaagatcgcgccacgctttaggcttcgtccccagttttccatccttcgcagctgtgagtaatttttctttcgttatttcgttcggaagtaaactcatatcaagcgcgtcccattcttttctgtcactgtcaaagccatagacaatgactctgtcatcattaaaagcaaacaggatccgctccgcctgaccatcactattcagatcttgctcgaccaggacgcaggcgtctttttcaatacaggtcatcacgttatagcgatcctggattaaggcgctccagaatgtcgcatcaggtttaacagaaccaggggcaattaacacattatcggctaatactttttcgcttacctgttgctgaagatgttgctctccatctaacgccatcagcagatcccgcgcgcgtttcgggtctttcataaacccggcatcgcttttcaggctctcaagcgcagcacgtccatagcgaccgctctgctcgagcatgtagatagttacctggtcactcgtgtttttgccgctctgataacgcgccatatggctgttcacgctaatgcgcatactgtccagcaccgggctattaagaagcaccagtatcaccaacaccaataagctaaccgcaaggttcactttgccctgaagaacaacgggattttgccctttacgccagacgatgctgacaaaataccccaggctccacaccagtaacaccagcaccgccagcacgccctgcaagcggtcgacagtccagccgtactgagcgacccgcagccataacgcccaggcggcgacgaacacatacagcggagcaaccagcaaagcggttttaatcaggcaacgcaacggccctgtccagggaagactcgctttttgcggatcgcggacaatagccattaagatcaattgcaaaaaggccagcgtcaacagcaacccggcggcggagatgtggcgagaaatcgcgctcaggcccgtaaacggcagggtgatgataaacatcagggttagcaaacttactaacggcagcaaccccgtggcgattaacgtgaacaacttttgaatagagtcgattaaacgactctgtgttcgcgcgaggatcaccgccagcgcggtaaccagacctaacgtgagataaataaaccagtcggttgcaaaaaagagcgtattgaaaaacgtgatgccaacaagtttaaacaactcactccacagtaaaagcaccagccacgtcaagccattggcgagaaaaatcaccagtaatataagtacgttatgccatacactctggtaaaaatagcgatagcggctactgtcattgcggatgcgaaggctttgttgtatccacggtagcaacaacattgccatcaacagcagatagcaaccaaaatcccaaagcgccttttcagctctccaggggttcatgccatcagtttgccacttcagccagccgctcatccccagcgtggcaataaacactagcgccagccatccccaaaggcgcttctgtttaaaagagatcacggagaagagtaaaacggaactaaacgcgacggtcgcaggcacgccataaacaatccaactgtgattttttccggaaagccaggcgatcagcaggtagcaaaccagaccctgaagtaatccggtagcaatcatcccccagcgtgttgcgggactaagttcaacgttatccatgttggttatccagaatcaaaaggtgggttaattatcgcatccgggcagtagtattttgcttttttcagaaaataatcaaaaaaagttagcgtggtgaatcgatactttaccggttgaatttgcatcaatttcattcaggaatgcgattccactcacaatattcccgccatataaaccaagatttaaccttttgagaacattttccacacctaaaatgctatttctgcgataatagcaaccgtttcgtgacaggaatcacggagttttttgtcaaatatgaatttctccagatacgtaaatctatgagccttgtcgcggttaacacccccaaaaagactttactattcaggcaatacatattggctaaggagcagtgaaatgcgcgttaacaatggtttgaccccgcaagaactcgaggcttatggtatcagtgacgtacatgatatcgtttacaacccaagctacgacctgctgtatcaggaagagctcgatccgagcctgacaggttatgagcgcggggtgttaactaatctgggtgccgttgccgtcgataccgggatcttcaccggtcgtagtccaaaagataagtatatcgtccgtgacgataccactcgcgatactttctggtgggcagacaaaggcaaaggtaagaacgacaacaaacctctctctccggaaacctggcagcatctgaaaggcctggtgaccaggcagctttccggcaaacgtctgttcgttgtcgacgctttctgtggtgcgaacccggatactcgtctttccgtccgtttcatcaccgaagtggcctggcaggcgcattttgtcaaaaacatgtttattcgcccgagcgatgaagaactggcaggtttcaaaccagactttatcgttatgaacggcgcgaagtgcactaacccgcagtggaaagaacagggtctcaactccgaaaacttcgtggcgtttaacctgaccgagcgcatgcagctgattggcggcacctggtacggcggcgaaatgaagaaagggatgttcagcatgatgaactacctgctgccgctgaaaggtatcgcttctatgcactgctccgccaacgttggtgagaaaggcgatgttgcggtgttcttcggcctttccggcaccggtaaaaccaccctttccaccgacccgaaacgtcgcctgattggcgatgacgaacacggctgggacgatgacggcgtgtttaacttcgaaggcggctgctacgcaaaaactatcaagctgagcaaagaagcggaacctgaaatctacaacgctatccgtcgtgatgcgttgctggaaaacgtcaccgtgcgtgaagatggcactatcgactttgatgatggtagtaaaaccgagaacacccgcgtttcttatccgatctatcacatcgataacattgttaagccggtttccaaagcgggccacgcgactaaggttatcttcctgactgctgatgctttcggcgtgttgccgccggtttctcgcctgactgccgatcaaacccagtatcacttcctctctggcttcaccgccaaactggccggtactgagcgtggcatcaccgaaccgacgccaaccttctccgcttgcttcggcgcggcattcctgagcctgcacccgactcagtacgcagaagtgctggtgaaacgtatgcaggcggcgggcgcgcaggcttatctggttaacactggctggaacggcactggcaaacgtatcagcattaaagatacccgcgccattatcgacgccatcctcaacggtagcctggataatgcagaaaccttcactctgccgatgtttaacctggcgatcccaaccgaactgccgggcgtagacacgaagattctcgatccgcgtaacacctacgcttctccggaacagtggcaggaaaaagccgaaaccctggcgaaactgtttatcgacaacttcgataaatacaccgacacccctgcgggtgccgcgctggtagcggctggtccgaaactgtaatgatttgaagctggagaatatctatccagtatcttatagaaagcaaaacgggaggcaccttcgcctcccgtttatttacccttcttttgtcgtgccctgcgcccgcgttaccggcactggcagccaggcgcgaatggaaagcccgccccgctcgctggtgccaagctccagcatcccgttatggttatccacgatacgctgcacaattgccagccctaatcccgtgccgctaatggtgcgcgcactgtcgccgcggacaaacggctggaacaggtgcttacgttgttccggcgcaattcccggaccgtcatcttccacctggaaccaggcgcgattcggctccgttccgctgctgactttgatccagccattgccataacgggcggcgttgaccaccatattcgccaccgcgcgtttgatgctcagcgggtgcattttcacttcaatgctgccggggtaaagcgcggtttcaatttcccgctcatagccactttcggcagcaatcacctcaccgagtactgcattaagatccgccatttccatcggcatctcctgcccggtgcgcaggtagtcgataaactgctcaatgatggcgttgcactcttcgatatctttattgatgctttctgccagatagccatcctgctcgctcatcatctcagtcgccaggcgaatacgcgtcagcggcgtgcgcaagtcgtgacttacccccgccatcagcagcgtgcggtcatccgccagttgcttaacaccagccgccatatggttaaaggcacgggtaacggaacgcacctcgctagcgccatactcacgcagcggcggcggaataatccctttaccaacctgcaaggctgcgtgttcgagatcgaccaacggtcggttctggatacgaataaacagccacgccccgcctatcgccaatagcataatcgccagcgtatagcggaacagcggagagaaatcgccctgatgaatttcggtcagcggcacgcgtacccagatattggggctcagccaggttttcagccagacgacagggctacttttgttgacctcaacgcgcacttccgtcgggccgcccagttgctgcgccatctgatggcttaagaattcatagtgttgcgcccaacgcagacctgcctcttcggcagcctcgttggagtagagagagatccccagctcacggtagatctcccgacggaaagcgggaggcacaaccaactgcgtgccgtcctccagttgcagtttgtcggtcatcaacatacgcacttcgtacgcgaggactttattaaactgctggaggctcggcaaaatcgcgaagttcagcaccaccagataagtcgtcaccaggctggcgaacagcaaggtgacgatgagcaataacgtacgggcaaaactacttcgtgggctgaagcgcaatcgcctcatgctttagagccgtccggtacaaagacgtagcccagaccccagacggtctgaatgtaacgcggatgcgctggatcttcttccaccatgcggcgcagacggctaatctgcacgtcgatggagcgttccattgcggaatattcacgaccacgggcaaggttcatcagcttatcgcgggagagcggctcacgcggatggctgaccagtgccttcagtaccgcaaactcaccgctggtgagcggcatcggctcgtcttcgcggaacatttcgcgcgtaccgaggttaagtttgaacttaccgaaagcaattaccgcctcttcctgactcggtgcgcctggcagttcgttcgcctgacgacgcagcaccgcacggatacgggccagcagttcacgcgggttaaacggttttggaatgtagtcgtcagcgccaatctccaggcctacgatacggtccacttcttcccctttcgccgtcaccataatgatcggcatcgggttgctctgactacgaagacgtcggcaaatgctcaagccatcttcaccaggtaacattaaatccagtaccataagatggaaagattcacgagtcagcaggcgatccatctgttctgcattagcgacgcttcgaacctggaagccttgttcggtgagataacgttccagcagcgcacgcaggcgcatgtcgtcatcgaccaccagaatcttgtagttctcttgcattgtttgtactcccaaaggttcgcaacaatttgtaagcgtgtattcttaaaaaagctcacgttcgtcaccagctaaatctggtatgaatttcagcctaaattgttacaaagcatattaaacagcagcttaagtatacaatttattcggcgaaacattattgattctgttgatatgatcacgttatacccaatgtgcgcattatcaaacagacaaagggaatcaacgagatgaaaacgcccctggttacccgggaagggtatgaaaaactcaaacaagagcttaattatctctggcgtgaagaacgcccggaggtcacaaaaaaggtgacctgggccgcaagtctgggcgaccgcagcgaaaatgctgactatcagtataataaaaagcgtctgcgtgaaatcgaccgtcgcgtgcgctatctcactaaatgcctggaaaatctcaaaatcgtcgattactcccctcagcaggaaggcaaagtcttttttggcgcgtgggtggagattgaaaacgacgatggcgtgactcaccgtttccgtattgtcggctacgatgaaatttttggccgtaaagattacatctctatcgattccccgatggcccgcgcattgctgaaaaaagaagtcggcgatctggcggtggtgaatacccctgccggggaagcgagctggtatgttaatgctatcgagtacgtgaaaccgtaaggaagagtcttaacctcctgccgatggctggcatttttgccagccagtccgtataactatcccctgatttttgatccgaaaagatgaactcaaaccatgatgaatgatagcttctgccgcattattgcgggtgaaattcaggcgcgcccggaacaggttgacgctgccgttcgcctgcttgacgaagggaataccgtgccgtttatcgcacgttatcgtaaggaaatcaccggcggtctggatgacacgcagctgcgtaatctggaaacgcgtctgagctatctgcgcgagctggaagagagacgtcaggcgatcctcaagtccatttccgagcaaggcaaactcaccgatgatctggcgaaggccatcaacgccaccctaagcaaaaccgaactcgaagacctctacctgccctacaaacctaaacgccgcacccgcgggcaaatcgccattgaagcagggcttgagccgttggctgacctgctgtggagcgatccgagtcacacgccagaagtcgccgctgcacaatatgtttatgccgataaaggcgtggcagataccaaagccgcgctggatggcgcgcgctatatcctgatggaacggtttgccgaagatgccgcgctgctggcgaaagtgcgtgattatctgtggaagaacgcgcatttggtttctacggtggtgagcggtaaagaagaggaaggggcgaaattccgcgactatttcgatcatcacgaaccgttgtccacggtgccttctcaccgcgcgctggcgatgttccgtgggcgtaacgaaggcgtacttcagcttagcctgaatgccgatccacagttcgatgagccgcccaaagagagctattgcgagcaaatcatcatggatcaccttggcctgcgcctgaacaatgccccggcggatagctggcgcaaaggcgtggtgagctggacgtggcgcatcaaggtgctgatgcatctggaaaccgaactgatgggcaccgtgcgcgaacgtgcggaagatgaagcaatcaacgtctttgcccgtaacctgcacgatctgctgatggcggcccctgccggactgcgtgcaacgatgggcctcgatccgggtctgcgtactggggtaaaagtggcggtggtcgatgccactggcaaactggtggcgaccgacaccatttacccgcacaccggacaggccgcaaaagcagcgatgaccgttgctgcgctgtgtgaaaaacataacgttgaactggtagcgatcggtaacggtacagcttcccgcgaaactgagcgtttctatctcgatgtgcagaagcagttcccgaaagtgaccgcgcagaaagtaatcgtcagcgaagcaggcgcgagcgtttacagcgcttccgagctggctgcacaggagttcccggatctcgacgttagcctgcgtggcgcggtgtctatcgcccgccgtttgcaggatccgctggcggagctggtgaaaatcgatccgaaatctatcggcgtaggtcagtatcagcatgacgtcagccagacgcaactggcccgcaaactggacgcagtagtagaagactgcgtaaacgccgttggcgtcgatctcaacactgcttctgttccgctgttaacccgcgtggcgggcctgacgcgcatgatggcgcaaaacatcgttgcctggcgcgatgagaacggtcagttccagaaccgtcagcaactgttaaaagtgagccgtctggggccgaaagccttcgagcagtgcgcgggcttcttgcgcattaaccacggtgataacccgctggacgcgtctaccgttcacccggaagcctatccggtggtggaacgcattctggcagcaacacagcaggcactgaaagatctgatgggtaacagcagcgaactgcgtaacctgaaagcgtctgactttactgatgagaaattcggtgtgccgacggtaaccgacatcatcaaagagctggaaaaaccgggtcgcgatccgcgtccggaatttaaaaccgctcagtttgccgatggcgtcgagacaatgaacgacctgcaaccgggtatgatcctcgaaggcgcagtgaccaacgtcaccaactttggcgcgtttgtcgatattggcgtgcatcaggacggcctggttcacatctctagtttgagcaacaagtttgtggaagatccgcataccgtggtgaaagcgggcgacattgtgaaggtgaaagtgctggaagtggatcttcagcgtaaacgtatcgccctgactatgcgcctggatgagcagcctggcgaaaccaacgctcgtcgcggcggcggtaatgaacgcccgcaaaacaaccgcccggcagccaaaccacgcggtcgtgaagcgcagcctgccggtaatagcgcgatgatggatgcgctggcggcggcaatgggcaaaaaacgttaaacgcccgtactggcctacggttcgaatttgcacgaaatcgtagggcagataaggcgttcacgccgcatctggcaacgaacgccttgcctgacataaaagtgccggagaatatctccggcatttttattccacagccaaactcataatatattccggcaatatttatcatttcattaacaactgaaaccttaattaaacattagccagtccgggtaattcactattcgaattatattttcgctgcgatataaccttgagccacatcaacattgagtcagattattattcaaaccaacattcgcacacattttaagtattgctgatagaaaccattctcattatcattgtgttgttgattatttaatctctcctttgttggcaaatcatctggtctcatgtcgctgtcaaacgccccatgaggtagttatccagttaatgagaaacaagtaggcacctatgcaatacactccagatactgcgtggaaaatcactggcttttcccgtgaaatcagcccggcatatcgccaaaaactgctttctcttggcatgttacctggctcctcttttaatgtggtgcgcgtcgctccactcggcgaccccattcatatcgaaacccgtcgtgtgagcctggtattacgcaaaaaagatctggccttattagaagtggaagcggtttcctgttaatacggtgataacaacaatgaaaaaattaaccattggcttaattggtaatccaaattctggcaagacaacgttatttaaccagctcactggcagtcgtcagcgtgtaggtaactgggctggcgttaccgtcgaacgtaaagaagggcaattctccaccaccgatcatcaggtcacgctggtggacctgcccggcacctattctctgaccaccatcagtagccagaccagcctcgatgagcaaatcgcctgtcactacattttgagtggcgacgccgacctgctgattaacgtggtggatgcgtctaaccttgagcgtaacctgtacctgacgctacaactgctggaactcggcattccctgcattgtggcactgaacatgctcgacattgccgagaagcaaaatattcgtattgaaattgatgctctgagcgcgcgtctgggctgtccggtgatcccgctggttagtacccgtggtcgcggtattgaagcgctcaagctggcgattgatcgctataaagctaacgagaatgtggaactggtgcattacgcacagccgctgctcaacgaagcagatagtctggcaaaagtgatgccttccgacatcccgctgaaacaacgtcgctggctgggcctgcaaatgctggaaggcgatatctacagccgcgcctacgccggtgaagcgagccagcatctggatgccgccctcgcccgtctgcgtaatgagatggacgatccggcgctgcacattgccgatgcgcgttaccagtgcattgctgccatctgtgatgtggtaagcaacaccctgacggcagaacccagccgtttcaccactgcggtagataaaatcgtgctcaaccgtttcctcggtctgccgattttcctctttgtgatgtacctgatgttcctgctggctatcaacatcggcggggcgttacagccgctgtttgacgtcggctccgtggcgctatttgtgcatggtattcaatggattggctacacgctccacttcccggactggctgactatcttcctcgcccagggcctgggtggcggcattaacaccgtgctgccactggtgccgcagattggcatgatgtacctgttcctctccttccttgaggactccgggtatatggcgcgtgcggcgtttgtgatggaccgtctgatgcaggcgctgggcttgccggggaaatcctttgtgccgctgatcgtcggtttcggttgtaacgtaccgagcgtaatgggtgcacgtacgcttgatgcaccgcgtgaacgtctgatgaccatcatgatggcaccgtttatgtcctgcggcgcgcgtctggctatcttcgcagtattcgcggctgccttcttcgggcagaacggtgcgctggcggtcttcagcctgtatatgctgggtattgtgatggcggtgctgactggcctgatgctcaagtacaccatcatgcgcggtgaagcgacgccgtttgtcatggagttgccggtctatcatgtaccacacgttaaaagcctgattatccagacctggcagcgtctgaaaggcttcgttctgcgtgctggtaaagtgatcatcatcgtcagcattttcctgagcgctttcaacagcttcagcctgagcgggaaaatcgtcgataacatcaacgacagcgcgctggcgtccgtcagccgggtgatcaccccggtcttcaagccaattggcgtgcatgaagataactggcaggcaacggttggcctgtttacaggtgccatggcgaaagaagtggtagtgggtacgctcaacaccctctacaccgcagaaaatattcaggacgaagagttcaatccggcagaatttaacctcggtgaagagctgttcagtgcgatagatgaaacctggcagagcctgaaagacaccttcagccttagcgtactgatgaaccccattgaagccagcaaaggcgacggcgaaatgggtaccggggcgatgggcgtgatggatcagaaattcggtagcgcagcagcagcttacagctacctgattttcgtcctgctgtatgtaccatgtatcagcgtgatgggggctatcgcccgtgaaagtagccgtggctggatgggcttctccatcctgtgggggctgaatatcgcttacagtctggcaacattgttctatcaggtcgccagctacagtcagcatccaacttacagcctggtgtgcattctggcggttatcctgtttaacatcgtggttatcggtctgctgcgccgcgcgcgtagccgggtggatatcgaactactggcaacccgcaagagcgtaagcagttgctgcgcagccagcaccaccggtgattgccattaatggctagtcttattcaggtgcgcgatttgctggcgttacggggccgtatggaagcggcccagataagccagacattgaacactccacagccaatgattaacgccatgctgcaacaactggaaagtatgggcaaagccgtgcggattcaggaagaacctgacggctgcctctctggcagttgtaaaagctgcccggaaggaaaagcctgtctgcgcgagtggtgggcgctgcgttaaccttactccatcgcctgttttggaaagcccggtatgcgtctgcatccgggcttttttgcgtgcggctttccataaaaatgcaactcttgcagcacggcgtaagttcctttgaaagcatctcgcagggatgaaaactcgctaatacacaggtgtggagtggcgcgtagagtcgcggcattcaaacaacaggtgaaggaacgccatgagcaaaaagcagagttccaccccacacgatgcgctgttcaaactctttttacgccaaccggacacggctcgtgattttcttgcgtttcatttaccggcacccattcacgcgctttgtgatatgaaaaccctcaagctggagagcagcagctttattgatgacgatctgcgtgaaagctattccgatgtgctgtggagcgtgaaaacggaacaaggaccaggatacatctattgtctgattgaacatcaaagcaccagtaacaaactgatcgcatttcgcatgatgcgttacgctattgccgcaatgcaaaatcaccttgatgctggatacaaaacgttgccgatggtggtgccattgttgttttaccacggtattgaaagcccctatccctatagcctgtgttggctggattgtttcgccgatcccaaactggcaaggcagctttatgcctccgcatttccgctgattgatgtcaccgtcatgcctgatgatgaaatcatgcagcaccgacgtatggcgctgctggagttaattcaaaaacatattcgtcaacgcgacctgatggggctggtagagcaaatggcctgcttattaagtagtggatacgctaatgacagacaaatcaaagggctgtttaattacatactgcaaactggcgacgctgtacgttttaacgattttatcgacggcgttgccgaacgtagtccgaaacacaaggagagtttaatgactattgcggaaagattgcggcaggagggggaacaatccaaagccctgcatatagccaaaataatgcttgaatccggagttcctcttgcagacatcatgcgctttaccgggctgagtgaagaagagttggctgcggcgagtcagtaaagttctgtctcgccatttcaaaagccacttacaccctctgcttcaacgccaccagcaggtgacaaaactcggccggatggctaataaatggcgcatgggccgctttggcgaagatataactttcgctgtgaggccaaagtttatccagcatcggcaccactttgcgcggcaccagaccgtcgagatagccatacaatcgcaaaaacggcatggacacgttttgcagcggctgacggagatcgaccgttttcaggatttccagcccgccattaagcacgtcaacctccggcatcggtaacgccagaacggttttcttcaacgcccgcgcatcctggcgcgccgtttcagtccccatggtttgtaacgccaggaaccgctccactgtacgctgaaaatcatcactgagttgctgctgaaatcccgccagcacgtccggttttatccccggccactcgtcacgagcactaaaacaaggactgctcgccacggtgaccagcgcctgaacacgctcgggatgggttaacgcaatctggcttgccaccagcccgcccagactccagcctaaccaaatggctttatcaggtgcctgttgcagcacggcttcggccatatcagcaagactcagcgcaccaaatccccggctacgcccgaagccgggcaggtcaacaaggtgcagcgtaaaatggctgctaagttcctcgtcaatgcaacgccacacttcggcattcagtccccatccgtgcagcagcacaagatgaacattcccctgacctttggtctgccaccagatgttattcatccgctattgttctcttttgacttacaaggatgaacatatgctaacagtaccgggattatgctggctatgccgaatgccactggcgttaggtcattgggggatttgtagcgtctgtagtcgcgccacccgcacagataaaacgttatgcccacaatgtggattacccgccacacactcccatcttccctgcggtcgctgcctgcaaaaaccgccgccctggcaaagactggtcacggttgccgactatgcgccgccgttaagtccgcttatccaccagcttaaattttcccggcgcagtgaaatcgccagcgccctgagtcgtctgttactattggaagtcttacacgctcgtcgcaccaccgggttgcaattgccggatcgcatcgtcagcgttccgttatggcagcggcgtcactggcgtcggggatttaatcagagcgatttgctgtgtcagccgttaagtcgctggttgcactgccaatgggatagcgaagccgtcacacgtacacgggccactgcgacccagcattttctcagtgcccggctgcgcaagcgcaacctgaaaaatgcctttcgtcttgaattgcccgtgcaaggtcgccatatggtgattgtggatgatgtcgttaccaccggaagtaccgtcgcagagattgcgcagttgcttttacgcaatggtgcggcggctgtccaggtctggtgcctttgtcgaaccttgtaaagcctcgatgatgggcgtattataaccaactaaaatagtcaactattaggccattactatgatccgtatttccgatgctgcacaagcgcactttgccaaactgctggcaaatcaggaagaagggacacaaatccgcgtatttgtgattaaccctggcacgcctaacgctgaatgtggcgtttcttattgtccgccggacgctgtggaagccaccgacacagccctgaaatttgacctgctgaccgcgtatgttgatgagttaagcgcaccatacctggaagatgcagagatcgattttgttaccgaccagttgggttcccagttaacgctgaaagccccgaacgccaaaatgcgtaaagtggcagacgatgcaccgctgatggagcgcgtggagtatatgctgcagagccagatcaacccacagcttgctggtcacggtggtcgcgttagcctgatggaaatcaccgaagacggttacgccattctgcaatttggcggtggctgtaacggttgttccatggtcgatgtgacgctgaaagaagggatcgagaagcagctgctgaacgaattcccggagctgaaaggtgtgcgcgatctcaccgaacaccagcgcggcgaacactcctactactaagttatcccctcttttgtagattgcccgatgcgacgctaaagcgtcatttcgggcctacgttgaacatgtgccagacgttggcgcagcattgctttgtcaaatcctcggttcgtttccccgcgataatatgaccaacctctcataatttaaatttaccccgctctggtgattctcaaacgccagatgttacccgtatcattcacatgggtaccaaacatactcctgacatctgactacaataattagttttagtgggtatcagtcgtggtgccgcaatatctctgttcccgattgggataattagagtttgtcgtcagaaaattgacgttacccataacaaatgaaaggccaggtaaatcatgccattagtcattgttgctatcggtgtaatcttgttgttgctcctgatgatccgcttcaaaatgaacggcttcatcgctctcgtcctcgtggcgcttgctgttggattaatgcaaggaatgccgctggataaagttattggctccatcaaagccggtgtcggcgggacgctcggtagccttgccctgatcatgggttttggcgcaatgctgggcaaaatgctggcagactgcggtggcgcacaacgtatcgccaccacgctgattgccaaatttggtaaaaaacacatccagtgggcggtggtactgaccggttttaccgttggttttgccctgttctatgaagtgggctttgtgctgatgctgccgctggtgtttaccatcgcggcttctgcgaatattccactgctgtatgttggtgtaccaatggcggctgcactgtctgtgacccacggcttcctgccaccgcatccgggtccgactgcgattgccaccattttcaatgccgatatgggtaaaaccctgctgtacggtactattctggcaatcccgaccgtgattctcgccggtccggtttacgctcgcgtgttgaaaggtatcgataagccaattccggaaggtctctacagcgcgaaaaccttcagcgaagaagagatgccgagctttggcgtcagcgtctggacctctctggtgccggtagtactgatggcgatgcgtgcgattgccgaaatgatcctgccgaaaggtcacgctttcctgccggtagcggagttcctcggtgacccggtaatggcaacgctgattgccgtgctgattgcgatgttcacctttggtctaaaccgtggtcgtagtatggatcagattaacgacacgctggtttcttccatcaaaatcattgcgatgatgctgttgatcatcggtggtggcggtgcgttcaagcaggtgctggtagacagcggcgtggacaaatacattgcttccatgatgcacgaaaccaacatttctccgctgctgatggcctggagcattgctgccgtactgcgtatcgcgctgggttccgcaaccgttgcggcaatcactgcgggtggtatcgcggcaccgctgattgcaacgacgggtgttagcccggagctgatggttattgcggttggttccggtagtgtgattttctctcatgtgaacgatccgggcttctggctgttcaaagagtactttaacctgactatcggcgagaccatcaaatcctggagcatgctggaaaccattatcagcgtgtgcggtctggtaggctgtctgctgctgaatatggtgatttgataacactgactgccggatgcggcgtgaccgccttatccggcctacgattcgggatgaattagtaggccggataagacgcgtcaagcatcgcatccggcatcaaccgcactttacttcttcttcgctgcagctctgcgccgtctgtccaaatccttcagcaacttgttcacgccatcatcggcaaacatgctctcaagcgttgcggaaagcttgcgtcgccagtttttatactggtaactggtgccaggaatattcaccggttcggccatatccagccagtcttccggctgtagtcctaacagagcactgttactgtcggcaatgtagcgctgcaaaccacggttcagcgtcggcgtcatgctcatcaagcttgccttatgcccggcacgtttcggcagacaaccatatttatgcagtgcatccagcagcccttgcttcgccagttcgcgatcctgatacagaccgcgcagtaccacttcatccggatacagccccagggttttgcccagcgttagatccccgcactcccagtaaccgcgcagcgttggcaggtcatgtgtcgccgcaaccgccatgctctgctccggatacgctttcggtgcacggaacgtcttctcgtggtcgttttcgaaatagagcactttgtaagagtacacaccgctgctgcgcagcttaccgacaatctctaccggtacggtaccgagatcttcaccaatcaccatacagcgatgacgtttactttcgagtgccagaatgctgagcagatcatccaccggatagtgaacatacgcgccctgatctgccgtctcgccatacggtatccaccacaaacgcagcatgctcatcacatggtcaattcgtaatgcgccgcagttttgcatattggcacgcaacagctcgataaacggttcataggcacgcgcggtgatgatatgcgggtccattggcggtaatccccagttctgccccaacgggccgaggatatccggcggcgcgccaacgcttgctttcaggcaatatagttcacggtcacaccaggtttccgccccaccttccgctacgccaaccgccagatcacgatacaagccaatcggcatttcatagccctggcttatctcccagcaggcggcaaactggctgtaagccagccactgcaaccagagataaaaatcgacgtcatcacgatgttcttcgcagaactgacgcacttctggactatccacgttctgatacatctctggccatgcaggccagccccagcgcatttcgtcctctttcacttgctgggcatgtagcgcatcaaaggctgcctgccagaacaggctgtcgccctgctctgcaacaaactggcgaaacgcggccatctgctcatcatcacgttgcgcgaaacctttccacgccattcgtaatgctgtcatttttagggcggtaaccgtggagtaatcgacccagtcggcatcgcgcgcctgttgcagcgtctgttgcgtggtcggcaactgccaccaggcctgagcctcttcgctaagatggaaatcttcaacggcgttaacgtcgatataaatcacattcagccaacggcgagaagacgggctgtatgggctggcgctctccggatttgccggatagagcgcatgaatcgggttcaggccaatgaagctcccgccacgttttgccacatccaccagcatcgctttgagatcgccaaaatccccaataccccagtttttttcgcttcgcagcgtataaagctgaacgcaggcaccccacagcttttgtttattcagcaacgcctgcggttcgtaacagcgtttcggggcgacaatcacccggcaatgcgcgcgctggtcgtcctgggtgagtgtcagcgtgtgataaccttccggcagcttcgtcggtagattgaacgctttgccccccgttacatggcctttgtactgcgttccttcttcggtggtcagcagccagctatattcgccgctgccctccaccaccatcggcatttttttgccgctggtataaaccatgacattcgggactggcgttaccgccactttcgtggcggtacgttgatgcatcgcgtcaagcaaacgccgtttggtttcggcgctaatgctctgcggtttaccgtgggcattgatgtaattggggctaatccccgccgccagcgcggcattatccagacgtttgctttccatcgagcttccttagcgttttgcctgccagatacgagcctgataatcgcgaatagagcgatcgctgctaaacataccgcagcgggcggtattgaggatcgccgcgcgagtccaggcctcctggtcgcggtacagcacatccacctgcttttgtgcctctacataggctgcgaaatccgccatcaccagatacggatcgccgccctgtttgccgatactgtgcagcatctagtcgaaggcatgcttatcgccgtcgctgtatttaccgctttccagctctttcaatactgcgtccagcaccttatctttcttccgccatttcaccgggtcgtagcctttggccagaattgccttcacttgttccacggtatgaccaaaaataaagatattttcttcaccgactttctcggcgatttcaacgttcgccccatccagcgtaccgacagtaagcgcaccattgagcgccagtttcatattgccggtaccggaagcttctttacctgcagtgctaatttgttcggagatatccgccgccgggatcagtttttccgccgcgctaacgcaataatccggcaggaacaccaccttcaacttatcgccaaccagcggatcgttgttgatcacgtcagccactttgttgatcgcaaagataatattcttcgccaggtagtagcccggtgccgctttcgcgccgaagaggaagacgcgcggtacgcgatcagcctgcgggttttcacgaatttctttgtacaacgccagaatatgcagcagattcaggtgctggcgtttgtactcatgcaaacgtttgatctgaatatcgaaaatcgcctgtggattgatctcaataccggtacgaactttcacaaactccgccagacggactttattcgcctgcttgatctcgcgatattgctgacggaatttcgcatcatcagcgaatttttccagattgatcagctgatcgagatcgttagcccactctttttgcagacttttatccaacagagccgccagtgccgggttgcactgtttgatccagcgacgtggggtaataccgttggtgacgttatggaatttgttcggccatagctggtgatattccgggaacagatctttcaccaccagatcgctgtgcagcgccgcaacaccgttcaccgcgaaaccgccaaccacacacaggttcgccatatgcacttgtttgtcgtgcaccaccgccagtttggcccacactttttcatcgcccggccaggttttctctaccagcgttttaaagcgagtattaatttcgttaataatctgcatgtggcgcggcagtaagcctttcaccagtttcacatcccagcgttccagcgcttctggcatcagggtatggttggtgtaagcgaaagttttgctggtaatggcccaggcgtcatcccagctcatctggtgctcatcgatcagcacgcgcagcagttctggaatcgcgatagttgggtgggtatcgttcagctgaataacttcgtaatccgccagttcgtgcagtttacgccccgccagatgatggcgacgcaaaatatccgctacgctacaggcacactggaagtattgctgcatcaggcgcagctttttaccggcagtatggttgtcgtttggatagagaactttggtcagtttttccgcattgatgccctgctgttcggcacgcaagaaatcaccgtcgttaaatttagtcagatcaaacggatgcgcgtgcgtcgcctgccacagacgcagcggctgcgccacgccattacgatagccgacaacggggagatcccacgcttgaccggtaatggtaaactccggctcccagcgtccgtctttcgtcactttaccgccaatccctacctgcacatccagtgcttcgttgtggcggaaccacgggtagttactgcgatgccagtcatccggcgcttcaacctgtttgccatcgacaaaagactggcggaacaaaccatattgatagttcagaccgtaacccgtcgcagactgaccgacagttgccatactgtcgaggaagcacgccgccagacgtcccagaccaccgttacccagcgccgggtcgatctcttcttccagcaggtccgtcagattgatgtcataagccttcaagctatcctgtacatcctgataccagccgagattcaacaggttgttgcccgtcaggcgaccaatcaaaaactccatactgatgtagttaacatgtcgctgattcgccaccggcttggcgaatggctgagcacgcagcatttcggccagtgcttcactcactgctagccaccactggcgaggagtcatttcagccgcagaatttaagccataacgctgccactgacgactaagcgcttcctgaaattgcttatcgttaaaaataggttgactcataggagttccacttttcttagattttcaacacaacgttatcgctagtttgccaggctcgatgttgaccttcctcatcctgcgggggattaggcagggaggagttgcggggatgagcaaggaaatgtgatctcaaccacttaaagctagtgcaaaccacaggattagcatcaaatcaatgcaatacagcgcagaaaatctgtatctaagtgcaaaaaatggccgttgcgtattttcaaaaagcggaaggtaactctataaattaagtaaaggagtgaaacagtttcataagtaaaatatccagtgtgctccatctcattcttaatagatttattaagatcatctttttagatggcactttcatcaggaatgaagaagaaacccttgcttaaatgaatctgatgaacataagggaaaccagtattcacgctggatcagcgtcgttttaggtgagttgttaataaagatttggaattgtgacacagtgcaaattcagacacataaaaaaacgtcatcgcttgcattagaaaggtttctggccgaccttataaccattaattacgaagcgcaaaaaaaataatatttcctcattttccacagtgaagtgattaactatgctgattccgagtaaactaagtcgtccggttcgactcgaccataccgtggttcgtgagcgcctgctggctaaactttccggcgcgaacaacttccggctggcgctgatcacgagtcctgcgggctacggaaagaccaccctcatttcccagtgggcggcaggcaaaaacgatatcggctggtacagcctggatgaaggtgataaccagcaagagcgtttcgccagctatctcattgccgccgtgcagcaggcaaccaacggtcactgtgcgatatgtgagacgatggcgcaaaaacggcaatatgccagcctgacgagtctcttcgcccagcttttcattgagctggcggaatggcatagcccactttatctggtcatcgatgactatcatctgatcactaatccagtgatccacgagagtatgcgcttctttattcgccatcaaccagaaaatctcaccctggtggtgttgagtcgcaaccttccgcaactgggcattgccaatctgcgtgttcgtgatcaactgctggaaattggcagtcagcaactggcatttacccatcaggaagcgaagcagttttttgattgccgtctgagtagcccgattgaagccgcagaaagcagtcggatttgcgatgacgtttccggttgggcgacggcactacagctaatcgccctctccgcccggcagaatacccacagtgcccataagagcgcacgccgcctggcgggaatcaatgccagccatcttagcgattatctggtcgatgaggttttggataacgtcgatctcgcaacgcgccattttctgttgaaaagcgccattttgcgcagtatgaacgatgccctcatcacccgtgtgaccggcgaagaaaacgggcaaatgcgcctcgaagagattgagcgtcaggggctgtttttacagcggatggatgataccggcgagtggttctgctatcacccgctgtttggtaacttcctgcgccagcgctgccagtgggaactggcggcggagctgccggaaatccaccgtgccgccgcagaaagctggatggcccagggatttcccagcgaagcaattcatcatgcgctggcggcaggcgatgcgctgatgctgcgcgatattctgcttaatcacgcctggagtctgttcaaccatagcgaactgagcctgctggaagagagccttaaggccctgccgtgggacagcttgctggaaaatccgcagttggtgttattgcaggcgtggctgatgcaaagccaacatcgctacggcgaagttaacaccctgctagcccgtgctgaacatgaaatcaaggacatcagagaagacaccatgcacgcagaatttaacgctctgcgcgcccaggtggcgattaacgatggtaatccggatgaagcggaacggctggcaaaactggcactggaagagctgccgccgggctggttctatagccgcattgtggcaaccagcgtgctgggtgaagtgctgcactgcaaaggcgaattgacccgcagtctggcgctaatgcagcaaaccgaacagatggcacgccagcacgatgtctggcactacgctttgtggagtttaatccagcaaagtgaaattctgtttgcccaagggttcctgcaaaccgcgtgggaaacgcaggaaaaagcattccagctgatcaacgagcagcatctggaacagctgccaatgcatgagtttctggtgcgcattcgtgcgcagctgttatgggcctgggcgcggctggatgaagccgaagcgagcgcgcgtagcgggattgaagtcttgagctcttatcagccacagcaacagcttcagtgcctggcaatgttgattcaatgcagcctggcccgtggtgatttagataacgcccgtagccagctgaaccgtctggaaaacctgctggggaatggcaaatatcacagcgactggatctctaacgccaacaaagtccgggtgatttactggcaaatgaccggcgataaagccgccgctgccaactggttgcgtcatacggctaaaccagagtttgcgaacaaccacttcctgcaaggtcaatggcgcaacattgcccgtgcacaaatcttgctgggcgagtttgaaccggcagaaattgttctcgaagaactcaatgaaaatgcccggagtctgcggttgatgagcgatctcaaccgtaacctgttgctgcttaatcaactgtactggcaggccggacgtaaaagtgacgcccagcgcgtgttgctggacgcattaaaactggcgaatcgcaccggatttatcagccattttgtcatcgaaggcgaagcgatggcgcaacaactgcgtcagctgattcagcttaatacgctgccggaactggaacagcatcgcgcgcagcgtattctgcgagaaatcaatcaacatcatcggcataaattcgcccatttcgatgagaatttcgttgaacgtctgctaaatcatcctgaagtacctgaactgatccgcaccagcccgctgacgcaacgtgaatggcaggtactggggctgatctactctggttacagcaatgagcaaattgccggagaactggaagtcgcggcaaccaccatcaaaacgcatatccgcaatctgtatcagaaactcggcgtggcccatcgccaggatgcggtacaacacgcccagcaattgctgaagatgatggggtacggcgtgtaagtttagccggataacgcgccagatccggcttacatctctgcatcattcaatgctcacccgcgttacgccatctgtttctatcaaactaaaccgcaccggcaagaaacgctccaccaccgcgatattggtcagcagatggcaactgggatgggcgaccgtaaattcccccgcgcccgccagcgccatcggtagcaccagttggtcagcaagatattcccccaccgccgccgtgcttgccaggtagcgtttcacctctttcaccaactgtgccgcaaccacctcggcactgacgcgcttttcaccgacgacaaaaaagcgttcggtgatattttcactttcgacttcaaggctgacggtattacccggcccctggtcgcgcggcaggttatgaatattctgttcatgcagggaaaaactccccgccagtgtagcgatttcacgctcagcaacatggcgcggcacaccagctaatagaacttctccacgcatctgcacaatgttcccgcgctcgccaagttgcaaggtgttaaagcttgccacggggctgacttccgttgccaccacaccgcctccggcagggtaaaaaccgtggcgtaacagcgtggtttgctgatgaattcctattttcgccagcagcggctccagcacccggcggataaaatccgcaggcggcgcgctcgggttatcggtgccgccgctcacttcaacacggctaggtccatcggcaaaccacagcgcgggcagcaccgtttgcagcaccagcgtacaacttccggcgctaccgatagcaaagcggtaatcgccgccgcgcacggtgccgggccggaagagcagacgctggctccccagctccgcgccttccacggttgctccgcaaatttccgtcgccgcctttaccgcggtcagatgctggcgcaacagccccggtttcgcccgcccggcacgaatgctggtgatggtaaatggctggccggttatcatgctcaggctcagcgcgctgcgcaggatctgcccgccaccttcgccctgtgcgccatccagcgcaatcatccttttcatcatttatccttttacgcacaccacctgacgcagggtatagataacttccaccagatcgctttgtgccgccatcaccgcatcaatatctttatacgccatcgggatttcgtcgatcacttcggcatctttacggcattccacatgcgcggtggcacgaatttgatcttccacgctgaacagttttttcgctttagttcggctcattacccgcccggcaccgtggctgcagctacagaagctctcttcatttcccagcccacggacgataaagctttttgctcccatgctaccgggaataattccatattgaccagcacgcgcagacaccgcgcctttacgcgtcacgtagatctcttcaccaaagtgctgttctttttgcacatagttgtggtgacagttgatctcttccatcgccagcgtttgtggctgtctgaccgttttctgcgtaatgctctgcaatgccgttaccacgttttccatcatcgcatcgcggttaaggctggcaaaaagctgcgcccaggccacggctttcaggtaatcatcaaagtattccgtaccttccataaagtacgccagatcacggctcggcaacgtctcaagcgtttcctgcatctctttttgtgccagatcgataaagtaagtcccgatggcgttaccaattccgcgactaccggagtgcagcataatccacacctggtcgctctcatcaaggcagatttcaataaagtggttaccggttcccagcgttcccaggtgtttatagttattggtattcaggaaacggggatatttttgcgttaaccactgataaccggcttcaagctcagcccatttagcatcgacgttaacaggtggattttcccaggcacctttatcacgtttacaacggccagtggtacgcccgtgcggcacggccgtttcaatcgcctgacgcagctctgccaggttttcaggcaggtcttccgccgttaacgcggtacgcagcgcgttcattccacagccaatatccacgcccaccgccgccggaataatcgcccctttggtcgggatcacgctaccaatggtggaacctttacccaggtgtacatcaggcattaccgcaatatgtttgaaaataaacggcatcttcgccgtattaataagttgctgacgcgcatcggcctctaccggcacgcctttggtccacatttttaccggggcattttcagtggtcagtaattcgtaattcattttgtttttctcttttcgttgtttgctgtcctgataattgcaaccgtcgtgccagaaaattaaataagcagcttaattttttaattcattgttttaaaaaagattatatctttacgtccgtaaccggagatttcccgcaaagccaatttaccgataatgaaatatcgtcttttataaggatatctaagatgcgtaaaacagtggcttttggctttgtcggtaccgtactggattatgccgggcgcggcagtcagcgctggagtaaatggcgtccgacactctgtttatgccagcaagaaagcttggtcatcgatcgactggaattgttgcacgacgcccgcagccgcagcctatttgaaacgcttaaacgcgatatcgccagtgttagcccagaaacagaagtggtgagcgttgagattgaactgcataacccgtgggatttcgaagaggtctacgcctgcctgcatgatttcgcccgtggttacgagtttcagccagaaaaagaagactatttaattcacatcaccaccggtacccacgtcgcgcagatttgctggtttctgctggcagaagcgcgttacctgcccgcccggctgatacaatctagtcctccgcgcaaaaaagaacagccgcgcggcccaggtgaagtaacgattatcgatctcgatttaagccgttataacgccatcgccagccgctttgccgaggaacgccagcaaacgcttgattttcttaagtccggcattgccacgcgtaacccccacttcaaccgcatgattgagcagatcgaaaaagtggcgatcaaatcccgcgcgccgattctgcttaacggtccaaccggcgcgggcaagagttttctggcgcgacgcatcttagagttaaaacaggcgcggcatcagtttagcggcgcgtttgtggaagtgaactgcgccaccctgcgcggcgataccgccatgagcacgctgtttggtcatgtaaaaggcgcgtttaccggggcgcgggaatctcgtgaaggtttattacgcagcgccaacggcggaatgttgtttcttgatgagattggcgaactgggcgcagacgaacaggcaatgctgctgaaagccattgaagagaaaaccttttacccgtttggcagcgatcgccaggtgagcagtgattttcagcttatcgccggaacggtgcgcgatttgcgccagctggttgccgaaggcaaatttcgcgaagatctgtacgcgcggatcaatctctggaccttcaccctgccgggtctacgccagcgccaggaagatattgaaccgaacctggattatgaagtggagcgccacgccagtctcactggcgacagcgtgcgttttaacaccgaagcgcggcgcgcctggttggcttttgcgacctctccccaggcaacatggcgcggtaactttcgcgaactttctgccagcgtcacgcggatggccacctttgccactagcggacgcatcactctggacgtggttgaagatgagataaaccgtctgcgctataactggcaggagagccgcccctccgcgcttacggcgttgctgggcgcagaggcagaaaacatcgatctcttcgaccgtatgcaactggaacacgttatcgctatctgccgccaggcaaagagcctttccgcagccggacgccagctttttgacgttagccgccagggcaaagccagcgtcaatgacgcggatcggctacgcaaatacctggcgcgttttggtctgacgtgggaagccgtgcaggatcagcacagctccagttgaatatggtggtccgtcagcacctgcatcacgcttactggcggcggggcgtcggtgtagacggcatctaccatgctgatgctgcccatattgaccatcgcgttacggccaaatttcgagtgatcgacaaccagcataacgtggcgcgagttctcaataatggcgcgtttggtgcgaacttcgtggtaatcgaactccagcagcgagccgtcgctatcgatgccgcttatccccagaatgccgaaatcaaggcggaactgggagataaaatcgagcgtcgcttcgccaatgatcccgccatcgcggctgcgtaattcgccaccggcgagaatgatgcgaaaatcttcttttaccatcaacgtgttagcaacgttgagattgttggtgacaatgcgcaaattgctgtgattgagcagtgcgtgcgctaccgcttccggcgtggtgccgatatcgataaacagcgtcgagccattggggatttgctccgccactttgcgggcgatgcgctctttttcttcggtctgggtggccttgcgatcgtgccacggcgtgttaaccgaactggaaggcagcgccgcaccgccatgatggccaggatcaggttttgctccgccagctcattgaggtcgcggcgaatagtctgcgggctgacggagaaatgctctaccagctcttcggtactgacataaccctgctgtttaaccagttcgataataccgttgtgacgttgtgtttgtttcatttataaatccctggaattattttcgttttcgcgcattgaggctatcaacaaaagccatcgctaaacccacggctaacccggcgatgtgtgctccgttcgccatgctcatcccaaacaaatcaaaccatccggcgacaatccagatcagcgcaaagataattaacccacgttgcaggtaaatgccactttgcggatcgcgttcgccacgtagccagacgtagcccatcagcgcatacaccacgccagaaagcccgccaaaccacggcccgctgaatttttgctgcacatagccgcttaacagggcgctgataagcgtaatgacaattagcttaccgctaccgaggcgtttttccaccgcaccgccgagataccaccaccagagcaggttaaagaggatatgcatcaggctgaagtgcattaacgcgtgggtgaagtaacgccagaactcaaatttcagtgttggatcgaatggccaggccagccataacatcacttcctgatcgccgagaatttgcatggcaataaacaccaccacgcaggcgatcatcatcacccaggttaccggacctgcgcgttcacgcaaggcggcaaagaaaggataacggcgataatgcaggccactgccggtatggcctgcctgccagctcgccgccagataacgcggatctgccgggttttcgagaaaacgcgccagctccgcccgtacgcgctcggcctgggactcatccgccagccagacatcgctttggttatgttgttgaatcgtgaggataacaccctgcgtcgccatgtaatcaacaaacgcctgcgccacgcgggggttagcaaaagaggtaatcatcaacatcgttgctgtcgcttattccacacaaaaggggacagtataaagcgttacgcgccgtacgccacctctgcgggaaactgacgttgccaggcttcaaagccgccgtcaatgctatagaccacatcgtagccctgttgcagcagatactgcgccgcgcctttgctgctattgccgtgataacacatcaccatcaccggagtgtcaaagtcgttatcacgcataaaagcgcccagcgtgtcgttggttaaatggaaagcctgcaccgcatgtcccattgcgaaactctgtggatcgcgaatatcgaccagcaccgcctctttttcctgcaacttctggtgcgcgtcggcaacgttaatacattcgaactgatccatgcgtctctctttctttacaaacaagtgggcaaatttaccgcacagtttacgtcgaagcggcagataaacgccataatgttatacatatcactctaaaatgttttttcaatgttacctaaagcgcgattctttgctaatatgttcgataacgaacatttatgagctttaacgaaagtgaatgagggcagcatggaaaccaaagatctgattgtgatagggggcggcatcaatggtgctggtatcgcggcagacgccgctggacgcggtttatccgtgctgatgctggaggcgcaggatctcgcttgcgcgacctcttccgccagtagtaaactcattcacggtggcctgcgctaccttgagcactatgaattccgcctggtcagcgaggcgctggctgaacgtgaagtgctgctgaaaatggccccgcatatcgccttcccgatgcgttttcgcctgccacatcgtccgcatctgcgcccggcgtggatgattcgcattggtctgtttatgtacgatcatctgggtaaacgcaccagcttgccgggaagtactggtttgcgttttggcgcaaatagtgtgttaaaaccggaaattaagcgcggattcgaatattctgactgttgggtagacgacgcccgtctggtactcgccaacgcccagatggtggtgcgtaaaggcggcgaagtgcttactcggactcgcgccacctctgctcgccgcgaaaacggcctgtggattgtggaagcggaagatatcgataccggcaaaaaatatagctggcaagcgcgcggcttggttaacgccaccggcccgtgggtgaaacagttcttcgacgacgggatgcatctgcctagcccttatggcattcgcctgatcaaaggcagccatattgtggtgccgcgcgtgcatacccagaagcaagcctacattctgcaaaacgaagataaacgtattgtgttcgtgatcccgtggatggacgagttttccatcatcggcactaccgatgtcgagtacaaaggcgatccgaaagcggtgaagattgaagagagtgaaatcaattacctgctgaatgtgtataacacgcactttaaaaagcagttaagccgtgacgatatcgtctggacctactccggtgtgcgtccgctgtgtgatgatgagtccgacagcccgcaggctattacccgtgattacacccttgatattcatgatgaaaatggcaaagcaccgctgctgagcgtattcggcggtaagctgaccacctaccgaaaactggcggaacatgcgctggaaaaactaacgccgtattatcagggtattggcccggcatggacgaaagagagtgtgctaccgggtggcgccattgaaggcgaccgcgacgattatgccgctcgcctgcgccgccgctatccgttcctgactgaaagcctggcgcgtcattacgctcgcacttacggcagcaacagcgagctgctgctcggcaatgcgggaacggtaagcgatctcggggaagatttcggtcatgagttctacgaagcggagctgaaatacctggtggatcacgaatgggtccgccgcgccgacgacgccctgtggcgtcgcacaaaacaaggcatgtggctaaatgcggatcaacaatctcgtgtgagtcagtggctggtggagtatacgcagcagaggttaagcctggcgagctaaattaacgtaaggtgatcaggtcagatttcaatctggcctgagactgatgacaaacacaaaactgcctgatgcgctacgcttatcaggcctacgtggtttatgcaatatattgaatttgcatggtcttgtaggccagataagacgttcacgtcgcatccggcatgaacaaagcgcactttgtcaaaaatctaacctactttttaattcagggaattaccgcaaagcccacgccatcatacccaacgtaacaaaactcaggcacgttccccactcgcccgctgaaaaatagcattaatgcgcccagcgccagcataaaaattttgagcagaaggtaaattgttggcgtgataaggatattacaaacttcaataataccggcaagtccgacacccagcatggcaataaccaccgccaaaaattgcgccagtatggggatgccgaaaaaagtcattaccaggctggtcaaaatccattttctgttttgcattattctttccattctttttgaatggtgaaattatactccccgagtccccttgccccttctggacacttttccgaaatgatggcggaaaaaaacgggaccctttggccccgttctatttattggtgaacttacaatctcaccggatcgatatgccagatatgatcggcgtactctttgatagtacggtcagaagagaagtagcccatattggcaatgttcagcatcgcttttgcggtccactcttcctgaagctcgtagagttcatcgactttatcctgacaatcgacatagctgcgataatccgccagtacctggtagtgatcgccgaagttgatcaggctatcaaccagatcgcgatagcgacccggatcttccggactgaatacaccgctgccgatttgcgtcagcacctgatgcagctcctcatctttctcgtagtattcacgcggtttgtagccctgacgacgcagttcttccacttcttccgctgtgttaccaaaaataaagatattgtcagcaccgacatgatccagcatctcgacattcgcaccgtccaacgtaccgatagtcagcgcaccgttaagcgcaaacttcatgttactggtgccggaagcttccgtccctgccaggctaatctgttcagacagatctgccgccggaatgatcaactgcgccaggctaacgctgtagttcgggatgaacacgactttcagcttatcgccaatctgcggatcgttgttgatcactttcgctacgtcattgatcaaatgaataatgtgcttcgccatgtaataggcgctagccgccttaccgccaaaaatattcacgcgcggtacccacttcgcatccgggtcggccttgatgcggttatagcgggtaatcacatgcaacacattcatcaattgacgtttgtattcgtgaatacgtttgatttgtacatcgaacaacgcctttggattcaccaccacattcagctgctgggcgatatactctgccagacgctttttgttctccagcttcgcctgatgcacagcgtgattaaccattgggaaatcacagtgttgttgcagctcattaagcaggctaaggtcggtgcgccagttacggcccaggtgttcgtccagcacggcactaaggcttgggttcgctaccgccagccagcgacgcggcgtcacaccgttggtgacgttggtgaaacgacccgggaagattttcgcaaagtcggcaaacaagctttgcaccatcagattagagtgcagttcgcttacaccgttaactttgtggctcacaacaaccgccagccaggccatacgcacacgacgaccgttggattcatcaatgatgctcgcccgtcccagcagatcggtatcgttcggatactgttcctgcaaggttttcaggaaatagtcgttgatttcaaagatgatctgcaggtgacgcggcagaattttacccagcatatcaaccggccaggtttccagcgcctcgctcatcagcgtgtggttagtgtaggagaagacctgacaacacacctcaaacgcgtcgtcccagctaaattggtgctcatcgatcagcagacgcatcatctcaggaatgctcagtaccggatgggtatcattgagatgaatcgcgattttatccgccaggttatcgtaggttttatgcaactgataatggcggcttaaaatgtcctgaatggtgctggaaaccaggaagtattcctgacgcaggcgcagctcacgcccggagtaggtggagtcatccggatacagtacgcgagatacgttctcggagtggtttttatcttccactgccgcgaagtagtcaccctggttgaatttaccgaggttaatttcgctactggcttgcgcactccacaaacgcagcgtgttggtcgcgtcggtgtcgtaaccagggattatctgatcgtaagcgactcccagaatctcttcggtttcaatccagcgcgtttttttaccttcctgctgaatgcgaccgccaaaacggactttatagcgcgtgttgtggcgtttgaattcccacgggttaccgtattccagccagtagtctgggctctctttctggctaccgttaacgatgttctgcttgaacataccgtagtcatagcggatgccgtaaccgcgccccggcaaccctaacgtcgccagagaatcaaggaagcaagccgccagacgtcccaggccaccgttaccgaggcctgggtcattttcttcatcaatcagctcttcgagatttaaccccatcgcttccagtgcgccctgtacatcttcgtaaattcctaggctcaacatggcgttggagagcgtacggccaatcaaaaactccatgctcaggtagtaaacctgacgagtttcttggctcaactgggcacggttactacgtaaccagcgctccacgagacgatcgcgcacagcaaataacgttgcgttcagccattcatgtttattggcgacgaccgggtcctttccaatcgtaaacatcagcttgtaagcgatagagtgcttaagagcttctacgctaagcgtggggctactatatgtaaacggagcattcatataggcgtttcctgaaaattatttcaagcgatagtaaagctcacggtagctcttcgccgcgacctgccagctaaaatccattgccatagcctgacgttgcacaaaccgccacagactaggacgggaccacagtacaaaagcacgtcgaatagcccgtaacaggctccaggcattactatcttcaaagacaaacccactggcgacgccatctgcaaggttctcaagagaacagtcagaaaccgtatcagcaagcccaccggtgcgccgcactaacggcagcgtaccgtacttcaatccataaagttgcgttaagccgcacggttcaaaacggctgggcaccagaatgacgtccgcgccgcccataatgcgatggctaaatgcttcgtgatagccaatctgaacgcccacctgaccggggtattccgctgccgccgcaaggaaaccttcctgcagcaccggatcgcccgcgccgagtagcgccagctgcccgccctgctccagaagacccggtaaggcttccagcaccaggtcgagacctttctggctggtcagacggctcaccactgcaaaaagcggcactttatcgtcaaccttaagccccattgcgatttgtaactggcgcttattttccgctttatcttccaacgtatcgcgggtgtaacggctggccaacagtaagtccgtctctggactccagattttctcgtccacgccgttcagtacgccggaaagacgcccttcacggtgacgctgttgcaacagaccttccataccgtaggcaaactgcggttcggtgatctcgcgagcgtaggttggactgaccgccgtaatgtgatcggcatagtacagaccggccttcaggaaagagatttgtccgttgaattccagcccatgaatattaaagaaactccatggcaattggatgtcattcatgtgatgtgcataaaacatgccttgataggccaggttgtgcacagtaaacacgctcttcgccggacgcccgcgcgccgccagatacgcaggcgcaaggcctgcatgccagtcgtgcgcatgcaccacatcaggacgccagaatgggtcaagcccgctggccatttctgccccaacccaccccagcagcgcaaaacgcaatacgttgtcggtataggcaaataagttggtatcgtgatacgggcttcccggacgatcatagagatgcggcgcgtcaatcaggtaaatgccaaccccgttgtaatgaccgaacaacagcgtgatatgtccggcgaaggtatcacgacgggatactacctgcgcatcggtcacgccacggcgaatatcgggaaatgcaggcaacagtacgcgagcgtcaacgccgtctgcgatttgtgctgcgggtaatgccccaataacatcagccagaccgccggttttaagcagcgggaacatctcactacatacatgtaaaacctgcattatcgctcctgtttatgccctaacttccgtagcatttcgcgcgttaccagcacgatgccttcttcactacgatagaaacgacgtgcatcttcctctgcgttttcaccaatcaccatgccttccggaataacacaagcacgatcgatgacgcagcggcgcagacggcagctgcgacctacccatacttccggtaacaatacggcggaatcaatgttgcagaaactattcacgcgaacgcggctgaacagaacggactgcaccaccacgctaccggagatcacacaaccgccggaaaccagactgttaagggtcatcccgtggctaccggagcgatcctgcacgaatttcgctggcggtaaactttcattgtaggtgcgaattggccaattgcgatcgtacatatccagttccggcaccacagaggccagatcgaggttcgctttccagtaagcttccagcgtacccacatcgcgccagtacggctcggcatccgggtcggattgtacgcaagagagcgggaacgggtgcgcataggccagaccggcttcggtgatcttgggaatcaaatctttgccaaagtcgtggctggagttctcatcgcgatcgtcttcttccagcagttcatacagatagtcggcgtcaaagacgtagatacccatactcgccagagatttgctcggatcgttcggcatactcggcgggttagcaggtttttcaacgaattcgataattttatcgttctcatcaaccgccataacgccaaatgcggaggcttcttcaatcggtactggcatacaagcaacggtgcaacgtgcgcctttttcgacgtgatcgataagcatacggctgtagtcttgcttgtagatatggtcgcccgccaggatcaccacgtattccgctttataacggcggataatgtcgaggttttgggtgaccgcatctgcggtgccgcgataccagttttcccctttcattctctgctgtgctggcagcagatcgacaaactcgttcatttcttcattgaagaaactccagccgcgctgaatgtgctgcaccagagtgtgggactggtactgggtgatcacgcccatacgacggatcccggagttgatgcagttagacagcgcaaagtcgataatgcggaacttaccgccgaagtgtacggccggttttgctcgcttattggttaaatccttcaggcgggtaccacgtcctcccgccagtatcagggcaacagatttcaatggcagctggcgcgccaacattaagtgatcgttcttctctaaactaaccatgactaactccttttttatcatctctggaacacacacaatccgtgtgcaggtccctgccagacagccgtaatcactgggttatcctctccagcgaatgggggaatggcgtgccactccccagcaggtaaaacaatctctgttacctcaagcgtggcgttaattgcgatcaaaaagcgatcgctgagcagaatttgcagctgtttcggcccgttttgccactcatccgtgcttaaaggttgagcatatcgatttagccaacggacattgccgtcgccttcttcccaccagcgattctccaccaaagcgggaatgcgcttgcgcagatggattaacgcggcggtaaatgcggttaaaccactgcttgcctggctccagtccaaccaggttaattggttatcctgacagtaggcattgttattgccatgctggctgtgaccatgttcgtcaccggccagtaacatcggcgtaccctgggagagcaacaacgttgttaacagggcgtgaatgctgtcgcgccgccgttcaaccaggtcaagagaaccgcctaacccttctttaccatgattgttactgtaattgttgttggtcccgtcgcgattttcttctccgtttgcttcattgtgtttatggttgaagcaaacgcagtcgcgaagcgtaaaaccgtcatgcgcggtgacgagattaatcgcggcactcggcagacgaccattacgtttaaaaacatcgctggaggcagcaaaacgcccggcaaacgcccccagaggcaaatcataatgtagccagaaacgacgggcagcatcgcggaaatgatcgttccactcggcaaacagcggcgggaaatttcccacctgataaccaccaggagcgatatcccacggttcagcaattaacttcacctggctgagcaccgggcagttctggatagcggtaaacaacggcgcatcctgacggaactctggcgtacggcccatgactgccgccagatcaaagcggaaaccatcgacgtggcaggtttctacccaataacgcaggcaggcgctggcataatccaccaccgccggatgactcaaattgagcgtgttgccgcaaccggtccagttgtgataatcgccgtcttctcttatccaataatagctacggttatcgatcccacgcaggctgaataacgggccgtcgaggtccagttccgcactatggttgagcacgatatcaagaatgacttcgatacccgctttatgcagtgctttgattgcatcgcgaaactcatccagcgccgtttctgggctgcaggcatacgccggatgcagcgcaaacatcgccaccgggttgtaaccccagtagttacttagccccatgcgttgcagacgtggttcactggcaaactgcgccactggcagcagttccagcgcggtaatgcccaattgtttcaaatagttgatcatcaccggatgcccgagggctttataagtgccacggatctcgaccgggatctccgggtgcaagtacgttaatcctttgacatgggcttcataaatgatggtgctgccccacggcgtgcgcggcggggcatcatcttcccagtcatagtgatcaaccaccactacgcatttcggcgcaatggcggcgttgtcgcgatagtcaggttcattatgaccggcgtgcagcagcgggttatctttaaactccccgtcaatttgccgcgcgcaaggatcaatcaacaacttcgccgggttaaagcgatgcccctcggcgggttgccaggggccatgaacgcgataaccataacgcaaacccgggcgcgcatccggcagataaccgtgccaaatgtcgccactgtgccctggcaagtcatagcgatgttcctggccattggcgtcaaagacacacagttctacccgctcggcatgagcggagaaaagtgtgaagttgacgccctgaccgtcgtaatgcgcgccgaggggagcgggtttgccaatggcgagttgtgtcattctgcctcccgaaccagccagatagtggccagcggtggtagcgtcaggcttagactatgctgacgaccgtggctggcaatctcatcgctgtgtaccgtgccgccattgcctgcattactgccgtgatagtgcatggaatcggtattgaggatttcacgccatttgcccggctggtttatgccgaagcgataatcatgacgcggtaccggcgtaaagttactggcaacgatgatttcgttaccctctttatcgcgacgcacaaagatcagcacgctgcgttctttgtcatccaccaccagccattcaaagccgtacgggtcaaaatccagttcatgcattgctttatggtggcggtaggtgaggttcagatcgcgcaccagacgctggacaccgtggtgccagttatcgccgccttccaacagatgccagtcgaggctggcgtcatggttccactcgcggccctgggcaaattcgttacccatgaacagtagtttcttgcccgggaatgcccacatccagccatagtaggcgcgcaggttcgcgaatttctgccatgcgtcgcccggcatgcggtcgagaatgctttttttaccgtggaccacttcatcatggctcaacggcaggacgaagttttcagtgtagttgtagagaatcccgaaggtcagtttatcgtgatgatactgacgataaaccgggtcgagcttcatgtagtccagggtgtcatgcatccagccgaggttccacttgtaccagaagcccagaccgcccatatcctgcggacgagaaacgccagggaaatcggtagactcctcagccattgtcaccgcaccggaaacctgctcaccaagaatacggttggtattacgcaagaattcaatcgcttcaagattctcgcgcccgccaaattcgttcgggatccactccccctctttacggctgtagtcgcgataaatcatactcgccaccgcatcgacgcgcagcgcatcaataccaaaacgttcaatccagtaaagcgcgttaccgacgaggaagttactgacttcacggcgaccatagttgtagatcagcgtgttccagtcctgatgatagccttcacgcggatcgctgtgttcatacaagttcgtgccatcaaattcggcaagcgcaaagtcatcagtcgggaagtggcctggcacccagtcgagaatcacgttcagaccagctgcgtgtgcggcatcaatgaaataacggaagtcgtcgcgagtaccaaaacggcgggttggcgcatacaggccggttggctgataaccccaactgccatcgaagggatgctcgttaatgggcagtagttcgaggtgggtaaagcccatccatttagcataaggcaccagttgatcggccagctcgcggtagctcaaccagaaattgttgtcggtgtggcgacgccaggaacccaggtgaacttcataaatagagattggcgcatcaaactgattcgcttttttgcgctcttcagtctgtacaaccttttccggcagcccgcaaataagagacgcggtttccgggcgcatttgcgcttcaaaggcataagggtcggacttcagacgcaagttgccattggcatcaatcatctcgtatttatagagctgaccgttatgcgccccagggataaacagttcccagatgccgctctctttacgcaggcgcatcgggtgacggcgaccgtcccagtagttgaattgcccaaccacgctgacccgacgggcgtttggagcccagacagagaaacgcgtacctgtgacgccatccatagtatctgcatgcgcgcctaaggtttcatacgggcgcaggtgagtaccttcagataatagccaggcatccatttcctggattagcggaccaaaacggtaaggatcatcaatcaggttttgctgaccatgccagacaacagccaactgatagcggaaaaaattcttacgtcgcggaatgacgccgctaaagaatccccgactgtcgagacactccagttttgcgagtttgcgcccggttttcggttcaatcacccacacatcggtagcgtcgggtaaaagggcacggacttccagtcccgcggtggttttatgcattcccagtacggaaaaaggatccgcaaaatggcctgcaattagcgcgttaatcacgtctctatcgatacgatcggacatgcttgtcttcctgttttattgtgtcaccccatccaattggatttttgacttctggttgtgacatttttttgacctgaacggcgcagcactctgtgcatcctctctgcgtcgtcctcacttcaggtaaggctgtgaatactcatgtattcagccacccttaaagaatagccaatgctctatttaactcccggtaaatcatgaaacatctgcgcttactcctgtattacgcactaacaggggcggcatcgcgccccagatttaatgaataaagattacgccagttgacgaagcatccgacgcagcggctccgcggccccccacagcagctggtcgcccacggtaaaggcactcaggaactctggtcccatattcagcttacgcaggcggcctaccggcgtggtcagcgtgccggtaacggcagctggggttagctcacgcatagtgatttcccgatcgttcggaacgactttcgcccacggattgtgcgcagccagcagttcttccacggtcggaatagacacatcttttttcaatttaatagtgaatgcctggctgtggcagcgcaatgccccgacacgcacacataaaccatctaccggaattacggaagatgtgttgaggatcttgttggtttccgcctgccctttccactcttcgcggctctgaccgttatcgagctgtttgtcgatccacggaatcaggctacccgccagcggcacgccaaagttatccaccggcagctcaccgctacgggttaaggttgtgactttgcgttcgatatcgagaatagcagaggacggggtcgcgagttcatctgccacatggccatacagatggcccatctgggttaataactcacgcatatgtcgcgcaccaccgccggaagcggcctggtaggttgcaacggacacccaatcaacaagatcattggcgaataaaccacccaagctcatcaacatcaggcttacggtacagttaccgccaacaaaagtcctgatgccattatttaatccgtcggtaatgacgtcctgattgacggggtcaagaatgatgatggcgtcatctttcatgcgcagagagcttgctgcgtcaatccagtaaccttgccatccgctttcacgaagctttggatagatttcgttggtataatcgccgccctgacaggtcacaatgatatcgagggcctttagcgcctccagatcaaaggcatcctgaagtgtgccagtggttccgccaaaagacggcgcagcctggccaagctgagaagtagaaaagaagacagggcgaatggcgtcgaagtcgcgctcttcaaccatgcgttgcatgagaacggagccgaccataccgcgccagccgataaaaccaacatttttcataagcgtttttttcctgcaaagatgtgtgctgtataaatgtgccggtctcctcttggcacatctttcaccatacaaaaagcagccaaagtcgcaagtgaaattaatcaatgatagcgaagccatcagtaatgcgacttatcctgctttgttagcacgcagaaagtccgcggcaattatcagggaatttgagttatgaatgaaatcatttctgcagcagttttattgatcctgattatggatccgctcggaaacctacctattttcatgtccgtactgaaacatactgaaccgaaaagacggcgggcaatcatggtgcgagagttgcttattgctctcctggtgatgctggtgttcctgtttgcgggtgagaaaattctggcatttcttagcctacgagcagaaaccgtctccatttctggcggcatcattctgtttctgatcgccattaaaatgattttccccagcgctagtggaaatagcagcgggcttccggcaggtgaagagccatttatcgtgccgttggcaattccgttagtcgccgggccgactattctcgccacgctgatgttgttgtctcatcagtacccgaatcagatggggcatctggtgattgctctgctgctggcctggggcggcacctttgtcatcctgctacagtctagcctatttttacgtctgctgggcgagaaaggggtgaacgcacttgaacgcctgatgggattgattctggtgatgatggcaacccagatgttcctcgacggcattcgaatgtggatgaaggggtaacgaggagagtttttcgaaaagaacccggtagcgtcacaactaccgggcgaacaaacttaactcaacagctggaacgcaatcatcccaacgatggcaccgacagtgccgaggatggtttccatcatggtccaggttttcagcgtttcggcttcggtcgcgccggtaaatttaccgaacaaccagaaaccggcgtcgttaacgtggctgacaacaatgctaccaccagcgatacaaatgctcagcgccgccatttgcgcaccggagtagttcagttgttcaataaccggcatcaccagtcctaccgccgttaaacaggctacggtggcagaaccctgaatgatgcgcactgcagctgccagcacgaagcaggtgatagcaatcggcaggcccatgccggttaacgcttcgcccagtgccggacctacgccagagtcaaccagcacctgtttgaacacgccgcccgcaccaatcaccagcagaatgatccccgccggttgcagcgcgtgaccgcaaatctccatcactttgtcttttggcatgccctgacgcattgccagaccgtaaatcgccaccagacaagcaaccagaatcgcggtaaacggatgaccgataaactcaaaccattcgtaagcagtacttccttccggcacaaaacgcgcggcaatggttttcagccctaccagcaccagcggcagcaggatcaggctcaggctgaatccgaaagatggcattttgccttcgccgagatgcggttcgctgatgtcgtcaggaatatgcagctcaacgtaacggctgatgaagttaccccacagcggcccggcaataatcattcccggaattgccgcacacaggccaatcaggatcatccagccaaagtcggcattcatctggcttgccagcagcatcggcgctggtccaggcaccagaaatgccgccgctgccgccacgcctgcaaataatgggattaccagcttcaccaggttcgtaccggtgtggcgcgccatactgaaagcaacgctaatcagcagaactatcgccacttcaaagaacagcggtagcgcacagaccagccccgcaaggccgatggcataatgcgcgcggctgtgaccgaaggatttgagcattttgacggcaatctgatcgactgcgccggtttcatgtaagatcttgccaaacatagctcccagggcgacaaccaccgccaggaagccgagggtgcctcccatccctttttccatcgtcgctgcgattttatcgagcggcataccagaaaaaaggccagcccccatggacaccaccattaaagccaggaaagcgtgcatacgcgccttcatgactaaaaacagcagcagtaaaacagaccctactgctgttaaaacaagcgttaatgtagtcactacttatttgccttttttaataacctcaatggtgcttgccacaacaccttccagcggttgatcgatatccaccaccagtacatcggtttcgtccgcacccggctcctgcagcgtttcaaactgcgtcaccaacatttgggttttaaagaaatggcctttgcgcgctttcaggcggatttcaatcacatcaaaatcgcctttcaaatagatgaaagagagattcggattaccttcacgcagcaagtcgcgatagtgttttttcaatgcagaacagacgatcaggctcactttattagtgcgctgcatagcaaacgcggcgtcgttcagcgcctgcaaccacggtttgcgatcgtcgtcattcagtggttcgccagacgccattttttcgatattgcgccgtggatggaggaaatcgccatcaagaaacgcggcatgaagttgatgcgccacttcactggcgaccgcagatttgccgctgccgcttacgcccatcaagacgtaaatgtggtgatcatggttagtcgtgctcaaagtggtgcccccacaatacaagaattaaaaatgttacgggtaactgttatcggtaacattgtccagccggacaatatcagaagcaatatccatccatgccttaagtgtataagtgtgagctacttcaaatttgtgggcttaaatagatccgcccggactcaaggtgaaacctaaatctaacattttcggtgtcacagattcgccacgaatacgcgccagcaggcgttcagcgccaatactgcccatccgctcacgcggcgtcagcacgctcgcaagtcgtggctccatcacctgaccaatgtcatgaccgtggaaaccggcaatcgccatatcgtcaggaacttttaaccccagacgctgacattcaaacgccgcgccgaccgccaggtcatcattcgtacagaacacgccatccagctgcggatattcccgccgcgcctggcgaatcagttcaataccggaagagtaagaagaagattgctcaaccatcacgctatatggcaccaggcctgcatccagcatcgcctgttcgtatcccttctgtttgatgatagtacgttcgtcgagacgtgcgccgagataggcaatgtggcgatgcccgcgagcaataatggcagtggtcatctggcgtgctgcttcaaagttatcaaaaccgacggcgatatcaaggcatgggctcttgctgtccatcagttccaccacgggaatacccgccacttcaatcatctttaaggtgcgcggcgtgtgggtacgttcggtgaggatcaggccgtcgatattccaggagagcatggattcgaggcgttcttgctccatttccggtttataaccgtagtgcgccagcatggtctgataaccgtgcgcgtcggtgacgctttcgattccgcgtaatacttccgcgaaaacctggttggtgagagaaggtaacaggacgccaatcgcccggctggtggcgttagagaggatatcgggcgcacgattgggaatatagcccagttcatcaagagccgcggcaatcttgccgcgtagagcgacggaaacctgctccgggttgcgtaaaaaacggctgaccgtcattttggtcacgcctacacggtcagccacatcctgaagtacgggtcttttctttttcatcgtcctgaaggtacaaaagagatagattctcttagtttaacacggacacatcagaaccttcccggggaaaacagtgcttgtttacaattattagatatacactaaatcaattgcatcgcattgtgctaacgacgcggcaaaaccccggaagcgtacatcagcacgcgaccggagcgagcgaggaagcctgcaaaaaggcaggcttcaaagatgccgttgagttttaaaccggcggcagatcgaacagtaacacttcgctgtcgctatccgcatggatggagattgcctgctcatcccagattgccagaccatcgctggtgctggctttcacgccgttaatggtgacattgcctttcaccacctggatccagacgcggcgttcagcggcaatctgatgcacgctctgctcatctttcagcaacgcccagcggtacagttccatatcctgatgcactttcaaactaccatctcgcgcatccgggctgagcaccagctgtttgccctgtacggcatcgaagcgacgctgttcataacgcggcgtaataccgttttcttcaggcatgatccagatctgatacagatgcagacgctcggtgctgcttgggttgtactcactgtgacgaatacccgtaccagcactcataatctggaactcacccgccggaacctgctctttattgcccatgctgtcctgatgctcaacagtaccttccagcacgtaggtcaaaatttccatatctttatgcgggtgagtgccgaagccctgccctgcttcaatcacgtcgtcgttaatcacgcgcagcgcggagaagcccataaagttcggatcgtaatagttggcaaaagagaaagtatgccaggagtccagccagccatgatttgcatgaccacgttcatttgctttgcgtaagtagatcatttgtattcgccccctgaatgatttcgatgggcttagtgtggacccgatctgcctgggatgatagagggtgaaaattgacccctctgttcaaaaaaattgaactattcgaggggccatcaaacttacttagcgagagttactgtggagggagaggcttgctcaaatccgcgttcaaggatttccagattggtaagaacttcagattccttgacgtaatttggcgcaccgtgggtgatggtttgatacaacgcatcataaacgcgcccgtaatcgcccatctccggcttcatctcttctctgaccgtcacgccctcgtcattgacatactccagcacaccgacgctatcatccgctgcgaatcccggttcgcccggcataatattagccttcaggctggtttcctgctggtcgataccgtatttaataaagctacctttcttaccgtgaacgataaatttcggataatcgattttcaccagatggctggttttgacgatggctttcaggtcgccataaaacagttgcgcttcaaaggtgtcgtcaggattggctttattacgcaggctgcggatgtcataagcgacgtgatccgggcgaccgaacagagaaataatctggtccatcgtatgcacaccaaggccataaaacgcgccatcctgcggcagcccaggtttggtttctgccaccgggcggtaatagtcaaaatggctttccacttcaacaatctctcccaacttgccactttcaatcgcttttttcgctgtcaggaagcaggagtcaaagcgacgattctgatacggcgtgacggtcagccctttgcttttcgccaacgcaaacagctctttcgcctgcgcaagtgtcggagtgaacggtttttcgaccagcacatttttcccggcttccagcgcgcgtttcgcgtactcgaaatggctgtccgcgtgggtgcagacaacaaccagcttaacatcgggatcgtttagtacttcgtcgagatcgctggtgaaatggatatgggaataaatgggagcctgttcttccggcttcgcatggcgacgaaaaatatgcgcgacatgccagctatccttgcggttaagtacatacggcagatggtaacgggtggtgcttttgccgaagccaataaaggcgcagttgatgaccatgatttcgtcctttttaaggtggttatttacaccttagcgcaaagcggacgtggttcctactggagtgcgcataacgaacacaagcactcccgtggataaattgagaacgaaagatcaaaaaaaaagccagcacccggctggctaagtaatactggaagcaatgtgagcaatgtcgtgctttcaggttctccgcgagggtcttcctgatcgcgagacaataataatcattctcattcgcacttgtccaacactttttgcaaaaaaatgcatttgactcgcatttgaaagtcaatgatgttgaaagggacatttaccccaaagaggacaaaggaacaaatgctcttcccacgaagagggccgctaaccttagtaccccgccgttaaatcatccacgctgcgcgggtcggatgcgccgtacaactcaccgtccggcccaaccataatgctttgtgtactgcccatcgcctctttcagcgccactttctgaccttttgcttccagcagcttgagcgtatccgggctaaaccctttttcgacacgcagctcgtccggcaaccactgatggtggaaacgcggcgcattggtcgcttcggcgacgttcaagccataatcgatgctattcaccaccatttgcagcactgtagtgatgatccggctaccgcctgggctaccggtaaccagccaggttttaccgtctttcaccacaatggtcgggctcatgctgctcagcgggcgtttgttcggcccgacggcgttggcatcaccgcccaccagcccgtaaacgttcggtacgcccggtttggcggagaaatcatccatctggttattaagcagaataccgctctcgcccgcgacaatgcccgtaccgaaggtggtgttcagcgtataggtcaccgccaccgcgttaccatctttatccaccacactgtaatgggtagtttgattactctcataaggcgcaagcttgccggggcgaatttcgctggatggcttcgctttattgatatcaatttgatcggcaatagatttggcataggctttattggtcagcgcctgccacggtactttgacaaaatccgggtcgccaagatattcgctgcggtcggcgtaggcgtatttctccgcttctgccatgatttgcatcgcatcggcgctgccaaagccgtatttcttcatatcgaagttttccagaatattgaggatttgtacgatatggatcccgccggaggatggcggtggcatggagtaaacctgatacccgcgataatcgccgcttatcggagtgcgttcgaccgctttataggctgctaaatcttctttagtgatcaagccaccgtttttctgcatctcctgggcgatctgttccgcaatcgtgcctttatagaattcgtccgggccgttttcagcaatcatctccaggctctttgccaggttcgcctgcaccagcgtgtcgccctttttcagcggctcgccctctttccagaagatagctttactgttttcgtgattcggcaacacttcgctaccgtaggttttgagatcgtcagccagcgcgtcgttaacgataaaaccatcgcgtgccagtttaaacgcgggctgcacgactttgttcagcggcatggtgccgtatttatccagcgccaggctgaaacctgctaccgtacccggtgtgccggaagccagatggctagtgagactttttttgctgtccgggttgccctgatcatcgaggaacatatcgcgggtcgctttggcgggtgccatttcgcggaaatcgatagccgtggtattgccatttttgctgcggattaacataaaaccaccaccgcccagattccctgcctgcggatgcgttaccgccagcgcgtagcccaccgccacggcggcatcaacggcattcccgccctccttgagaatatccacccccacctgagtggcagtggcgtccacagacgctaccattccctgtttcgcgcgtaccgggtggaagacatcttcctccacaccatagctgacgggcggcgcaggaggcgcggcggcggcgctaaaacaacttccactgagcagagcagcaatggccacccggcgtaaaaacgtcggttttatcatcgttattctccagagattaaggggcaaccccagctaagcctggtatataactctgaattaatcatcgttttgtcgggaagcgagtaaacttaaaggatatcttcagaggaggatacgcgatgaaacgacttctgattcttacggcactcctgccgtttgtcggctttgcacagcccattaatactctgaacaaccctaaccagccggggtatcagatacccagccagcagcggatgcaaacccagatgcagactcagcaaatccagcaaaaagggatgctgaatcagcaactgaaaacgcaaactcagttgcaacagcagcatttagaaaaccagataaacaataattctcagcgggtgttgcagagtcagccgggggagcgaaatcccgcccggcagcaaatgctgcccaacaccaacggcgggatgttaaacagcaaccgtaatccggatagtagcttgaatcagcagcatatgctgccggagaggagaaacggcgacatgctgaatcagcccagcacgccgcagcctgacattccgttgaaaactattgggccgtaattattgggccgtaaagttcggaccaatcacgtcaatcgcatcggtacagatgcaatccacaccccagcgcagcaactctgctgcgcgctggggtttattgacggtataaaccagaatccgcagtccggcgtctttcaactgcatcactcgcgctttattgagtaacttatgattgagatgaatagagacgcagcccagccgcgcggtcagttcgcgccagtcgtcgcgccactcatccagcaacaaaccgcgcggcagttccggtgccgcctgttgtgcagcttctaaagcatcaatctcaaagctactcagcagcggcggcgtcataccggcccacagctcgcgtgccgccagcgccaccattttgcccgttaatggcccggtgccggtggtgggtttgatttcgatattcgccatcatcccgtgttcgcggcaacgttccgccacctggctaagcaacggtagcggctcacctttaaacattttgctgtaccaactgcccgcatccacgcgcagtaaatcctgccagttcagttcacccgcgacgccccagccgttgctggtacgttcgagattgtcgtcatggagcaggaagatctcgccatctttgcttaacttcgcgtcaaattcgatcatcttatgaccgtattttgccccgacgtcgatactcgccagggtgttttccggggccagcttaccgccgccacgatgagcgacgatgcggggataaggccagttactcatactcgttgtcctgtttcaccatcaaaaagatgcagctgattttccgccagatgcagccacagcgtgctgcctgccgtcgggcgctcctgatgcgccagtcgcaccaccagcttctgctcgccccagcgtccgtgcgccaggttatctgcgccgaggatctccagcgtgtccatcaccatcggtacgccgccttctgcctggctgcttagcgcaatatgttccgggcgaatgccgagagtcattttacgcccggcatactgacggtagccaccgtttagcggcagctcaataccgccgtccagttcgaaatgcgtgccttcgttattcacgcggcctgtcagcaggttcatcgccggactgccgataaaactcgctacaaacaggctggcgggcttttcgtagacttcaactggtgtgccaatctgttcggcaacaccgccgttcatcaccattactcgctgggcgagcgtcatcgcttcaacctgatcgtgagtaacgtagagactagtcgttttcaggcgacggtgcaactgttgcagttcaagacgcatctgcacgcgcagcttggcatcgaggttagagagcggctcatcaaacaggaacaccgccggatcgcgcacaatcgcgcggcccatcgccacacgctggcgctgaccgccggaaagctcgcgcgggcgacgtttgagcagaccgtccagctccagaatgcgcgccgcttctttaacgcgctcggcaatttgctgcttgcccatgccgcgaattttcagcccccacgccatgttttcttcgacactcatatgcggataaagcgcgtagttctggaacaccatcgcaatcccgcgatcttttggctccatttcagtcacgcgctggtcgttgatccagatatcgccttctgtcacccgctccagcccggcaaccatgcgcagcagcgtgcttttcccgcagccagacggcccgaccatcacgataaattcgccatccgccacatcaagggtcagcggtttaatgacctgggttttaccatcccagcttttggttactgcctgtaatttcagtcctgccatcttatttctcactatcgaccaggccgcgcacgaaggcacgctgcatcactaaaacaatcaccaccggagggataagcgttaacaacatcgccaccatcacactgttccattccgtggtgccttcgcctgtagcgatcatccctttgatccctgccacggtggtgccgagatccacatcggtaataatcaacaacggccacaaatactgattccagccgtagataaaggtgatcacaaacagcgccgccagattagttttggagagcggaaaaacgatgtcgcaaaagaagcgcattgggcttgcgccgtcgatccgcgcggcttccaccagctcatccggcagcgtcataaagaactggcggaacaggaaagtagcggtcgcgctggccatcagcggcagcgttaaaccggcgtagctgtcgagcatctgcaggttggcgatgacttccaccgtcgggaagatacgtacttcaaccggcagcatcagggtgataaaaatcatccagaagaagaggttacgtagcggaaaacgaaaccagacaatggcaaatgcgctgagcatgctgacggtaattttgccgagcgtaatgctgaacgccatcacaaagctgttaagcaacatccgccagaacggcgcgctattcgtgcctaccccgttcacccagatgttgtggatgttttccagcagatgtgtgccggggatgagcgtcatcggcgcggcatagacggcctgtttatccagcgtcgccgcgacaaacgccacgtacagcgggaagaggatcaccgcgatcccgaggatcagcatggtatggctgaatatcgtcagccacggacggttctcaatcattggtaacgcaccttgctttcaacatagcggaactgcaccaccgtcagcacgatgacgaggaacatcaacaccacgctctgtgcggcagagctagccagatccagtccggtaaaaccttcgcggtagatcttataaatcagcgtcgtggtggcctgaaccggcccgccggacgtggcggcgtcgatcaccgggaaggtgtcgaagaaggcatacaccaggttcactaccagcaggaagaaactcaccggggcgataagcggcagcgcaatcttaaagaagcggcgaatcggccctgcaccgtcgatggctgcggcttcgatcaagctacggggaatggattgcagcgcggcatagaagaacaggaagttgtagctgatttgcttccatacactggcaaacaccaccagaaacattgcctgaccgctgttttgcgcgtggttccagtcgtagccgaactccgcgagaaaatgggtgatcagcccgcgaccggggttaaacaggaagatccacaatacggcggcaacggcgggagccacggcgtaaggcagcaacattaaggtttgatagaaacggctgccgcgcacgatgtactccaccagcgccgcaaagaacaggcttaccagcaaaccgctgacggtgacaaaggtgctgaattttatcgtcgtccagaaggagtcgagatagtagctgtcatggaacagcgtgacgaagttatccaggccgacaaactggctggagaaaccaaacggatcgacgctttgtaggctgtaccacaacgcttcgcccgcaggccagataaaaaagataacggtgatgatgagctgcggcgcgaccagcagataaggcagccagcggctgcggaacaccggacgggaactactcattacggttgattcctgaactgtgccggatgcgcttcgcttatccggcctacacgcgatgccaggtcagataagcgaaacgcatccgacattacactgattaagacttcgtgcttttctcaaagcggcgcagcaactgatttccacgctcaacggcggtatccagtgcctgctgtggtgtcttcttaccggtccacacgctctccagctcttcatccacaatcacgcggatctgcggcatgttgcccagacgcagccctttggtgaacggcaacggcggcttattcagcatctgacgcgtcgcggtatccgcccctgggtttttctcataaaagccctgctcacgggtcaggtcatacgctgctttggtgattggcagataaccggttttctgatgccactcggcagcgttttctggcttcgcgaggaaatcgaggaacttcgccacaccggtatacgtttctttatctttaccctgcatcacccacaggctggctccgccgataatggcgttttgtggcgcatctttcgcatcggcgtcgtaaggcatcatgcctacgccgtagttaaatttggcgtactcgcgaatgttggcaagagaaccggaagaggcggtggtcatcgcgcaatcaccgttatagaacttctcggtggattcatccttacgaccgacgtagctgaagtcgcccttcttgttcatctcctcgagcatggcgatgtgtttcacctgctccggcttattgaactccagcaccgcgtccgtgccgtcaaagccgttgtttttgctggcaaacggcagaccgttccaggcgctaaagttttccagttggatccagccctgccagccgctggcgtagccgcacttcatgccggaggctttcagtttcgcggcatagtccgccagatcctgccaggttttcggcggctgttccgggtctaatcctgctttcttgaaggcgtctttgttgtaatagagaacgggggtgctgctgttgaatggctgggagagtaagtggcccgttttgctgtcggagtagtaaccactaaccgtcggcacaaactggctctcatcgaactgaatccctgcctctttaaacacgtcatacaccggtttaatggctttgctcgccatcatggtggcggtgccaacttcataaacctgcaaaatagccggcgcgttgccggtacgaaatgcggcaatccccgcgcttaaattctgttcgtagttgcctttataggtcggtacaattttgtaatccgggttttcggcgttaaaacgttgggccagagaatccacctctttacccagttccccttccatagaatgccagaacggaatggtcgtcactgcctgtgcattccccattaacgccagtccgagcgccagtgcactagctgtataatgtaacggtttcatcgtttatctctcttgttgtaccgaatgcgcgaattcacgcgttttatgctcgcggggtaacatgacatgctcgaattacagaaaaataacttttttgttacatttgtaagatagtaaggtgtcagaaagatgacaaggcggtgacggcgtgggtgagggaaaatgggagatggggcacggataagcgggaaaatatagaaggtctgaatcaaactctacagattgctcatcgtttcatgccggatgcggcgtaaacgccttatcaggcctacaagatcgtgcaaattcaacatattgccactcacccagtaggcctgataagcgcagcgcatcaggcaattttacatttgtcacctgtctcaaaggagtcttttgactccctatcaatcaacgtgttattacccgcctaaatacgcacttctcaccgcttcattcgccagcagcgcatcaccagtatcggaaagcactacatggccgttttccagcacgtagccgcgatccgccagctttagcgcctggttggcgttctgctcgacgagaaagatagtcatcccctgctcgcgcagctgctcgatggtgtcgaaaatttgctggatgataatcggcgcaagaccgaggcttggctcatcaagcagtagcaaacgcgggttgctcatcagcgcacgaccaatcgccagcatctgctgttcaccgccggacatggtgcccgcccgctgaatacggcgctcatgcagacgtggaaacagctcatacacccactttatgcgctcctggaactggtcgcgttcagcaaaaaaaccgcccatcgccaggttctcttccaccgtcatccggctgaagacgcgacgcccttccgggacaatcgccaccgcttcgcgcatgattttcgctgtctgccagtcggtaatgtctttatcatcaaacacaattcgcccgctggtggcacgcggatcgccgcataacgtgccgagcaaggtggttttccccgccccgttcgcgccaatcagcgtgacaatctcgccctgattgatatgcaggctcacctcatgcagcgcctggattttgccgtagtgggcgctgactttgtcaaaggacaacatgactttttccatcttatgcctcacctaaataggcacggatcacgtccgggttattacggatctgctccggcgtaccgtttgccagcggcgtcccctgattgaccacgtaaattcggtcgctaattcccatcaccagcttcatatcgtgttcaatcaacaagatagtggtgttgtgatgattgcgcagttcggcaatcagctcatccagctctttcgtctctttcgggttaagacctgccgcaggttcgtcgagcattaaaatctccggctgcgtcaccatgcagcgggcaatctcaagacggcgctggtcaccataggccaggttactcgcctgacggttggcgtgttccagcaaaccaatgcgctcaagccaggtcgcggcgcggtcgagcgcttcgctctgggcgcgacggaaggatggcgttttcaacaggccagagaacagcccggttttcagttgctgatgctgcgccaccagcaggttttcaattaccgtcatttcacggaacagacgcacatgctggaaggtgcgcaccacgcccatgcgggcaatttgctgccccggtaaaccttccaggtgctgatcgcgcagtaaaatggtgccgccggtgggtttgtagaatccggtcagacagttaaaaaccgtggtttttccggcaccgttagggccgattaagctgacgatctcctgcgggtacagttcaagattgacgttgttcaccgccagcaggccgccgaagcgcatcatcaggccgttaacagataataatggctgactcatgcctgctctcctttcgctgcgccgtttttcagcttcagttgcgggcgcgtcatgggcagcaagccctgcggacgccagatcatcatcagcaccatcaaaccaccgagcattaacatgctgtattcgttgaaatcacgcatcaactcgcggctcaccaccagcaaaattgccgccagaatcaccgcaaattggctgcccataccgccgagcaccactatcgccagcacaaacgcgctttcggcaaaggtgaaggattccgggctgacaaagccctgacgcgccgcaaacagcgttccggcaaaaccggcaaacgcggcacttatggtaaaggcagtcagcttgatacgacgcgggcttaagcccaggctacggcaggcgatttcatcttcacgcaacgcttcccacgcacgccccagcggcatccgcagcaggcggttaatgacaaacaggcttagcaccaccagcagcaacgccaccaggtagaggaagatgacacgatcggagggatcgtatttcaggccaaagaaattactgaacgtgtcccagccgccttcacgagcggtacggctgaactcgagtccgaagagtgtcggtttcgggatctgactgattccgttcgggccgccggtaatttcggtgttattgagcagcaatatgcgcacaatttcgccgaaaccgagggtaacgatcgccagatagtcaccgcgcaaacgcagcaccggaaaaccgagcaggaagcccgccgccgctgccattaatccagcaatcggcaggcaggtccagaagcccaagccgtaatagtgattgagcagcgcaaaagtgtaagcgccgatggcgtaaaaaccgccgtaccccagcaccagcagaccagaaagaccaacaaccacgttcagcccgagaccgaggataatgtagatcatggtcagggtggcaatatccaccgtcccgcgactaaccataaacggccacgccaccgcaagcaccaacagcgccacgaggaacagtttctgcttcaccgtggagccatcaatggcgggcagaataaacttcggtccggaaacgcttttcaaccctttctggaaagccggtcgcaaaagctggaagaaaaagaccaccgccgtgccgataaacacccactgccaacggacatcgctagccgtgtcgaccaccagtttggtgccatccagctccagttgcacgcccataaagacgcccgccagcacaaagaacatcgcggcagagagcagcgccattgcaatatgcatcggtttcatactttctctacctccgggcgacccagaataccggtcggcatcaccagcagcaccagaatcagcagggcgaaactgaccacatctttatattccgtactcagataggcagaagagagcgcctccgcaatccccagaatcaggccgccaatcatcgctcccggaatgctgccaatcccaccgagcaccgccgcggtaaaggctttcatcccggccataaagccgatgtaggggttaatgacgccgtagaactgaccgagcagcacacccgccaccgccgccatcgccgcgccaatcacaaaggtcagcgcaatcacccggtcggtgttaatgccaagcagactcgccattttcagatcttccgcgcaggcacgacacgcgcgacccatgcgggaatagcgaatgaaaatcgtcagcgccagcatggcgaggaaggtaacaatccagatcaccgcctgcatggtggtaatagaggcagagaagttttcgctatgccccaccacccactgaccgttaaacaggctcggcagcgccacgtcgcggctaccttcggtcaggctgacgtagttttgcaggaagatggacataccgattgcagagatgagtgcaatcaggcgcttagagttacgcaccgggcggtaagccacccgttcgatactccagccgtaggcgctggcaatgacgattgcgccgacgaatcccgcagctaccagcagccagccggtatcaatgcccatcatcatcagcgcggcgatgatcataaaactgacgtagctgccaatcatataaacctcgccgtgggcgaagttgatcatgccgataatgccgtaaaccatggtgtagccgatggctatcagcgcgtaggtactgcccagcgtgacgccgttaaacatctgctgcaagaaatacaaaaactgctcagacataaggtaacctttctaaacccgcccgcattttacgggcggtgggatgatcacttggctgccgtggaactaccgtcggcgtgccactggaagacaccaaaatcaaatcccttaagatcgcctttttcatcccagttcagcggcccaatcacggtgtttgcaccgttagcttttaaatctttcaccagcgccagcggctcatcgctgccggtacgctcaagggcagtcgccagagattgcaccgccgcgtaggtgatccagacataaggcccggacggatctttcttgtctgctttcagcgcatcaacgatgccctggtttgccggatcctggtcatagcgttttggcatagtgaccaacatgccttcggcggcatcaccggcaatgttgctcaagctcgcattacccacaccttccggccccataaactgggttttcaggccaacggaacgggcctggcgcagcatctgccccatttccgggtagtaaccgccgtagtaaacgaagtcgatgttttcttttttcaggcgggcgatcagcgcggagaaatctttctccccggcggtaataccgtcgaagaagacgacgttggcgttagccgctttcagcccgtcctgcacgctacgcgccagcccttcgccatactgttgtttgtcgtgaatgatggcgatgcgctggggcttcaccgtctcaagaatgtattttgccgccgttggcccctgggaagagtccagcccggcagtacgcataatgtgttgataaccgcgttgggtcagctccgggttggtcgctcccgggctgatcatcagaataccttcgtcttcatagatatcactcgcaggctgggtagaagaagaacacagatgaccaataacgtatttaatgccgtcattaacgattttgttggcgaccgcaacggcttgtttcgggtcgcatgcgtcgtcatattccacgccaaccagtttatcgcccttaattccccctttggcattaatgtctttaattgcctgacgcgcgccgttaaattccatatcgccccactgggcaatcgggccggacatcgcgccgacaacggcgactttaatatcgtcagccatagcggtgtgactaattgccagtgcaatcatccctgcgatgatagttttcgcattccgtttcatagtcaaaaatccccattcgtgatgttgtgttgctttgtttttatgtgttaacaaatcagactgttctttttttatactgcactgtttttgcctgtctgattaaggggttagcgcagtattttgtgataatagcgattaaaatccctatttttcagtcgattaagaacagataatattctgaatttattgatagataaacagaaaaaagtgcctttgtcagcataaaataacggcacaaagggcggaataattcactatcattcaggggattatgctggacatttttcattctctaatgttttaattttgtaattattgctgttaaaaaattaatcacctgccaaaagaaataaaaaagagaaagcctccgattaaattatttcgctacactggttccacttttgtgatttacacgggttacccatgaagctgaccatcattcgattagaaaaatttagcgaccaagaccggattgacctgcaaaagatctggccggagtattccccttccagcttacaggttgacgataaccaccgtatctacgccgcgcgttttaacgagcgcctgctcgctgccgtgcgggtaaccttaagcggcaccgagggagcactggattccctgcgcgtgcgggaagtcacccgccgtcgcggtgtggggcaatatctgctggaagaggttttgcgtaacaatcctggcgttagttgctggtggatggcggatgcaggcgtggaagatcgcggtgtgatgacggcgtttatgcaggcgctggggtttacggcacaacagggcggctgggagaagtgttaatcgtcaagtttgatttcaaaagtgatattgcctgatgcgctacgcttatcaggcctacaatgtgtgttgcaatttactgatttctttggatcttgtaggccggataaggcgtttacgccgcatccggcatgaagcaacgtactcgatattagcaatttggcggcaacccaaagttgccgattaatgattacttcgcatcggtcgccgtgccgttggcgtgccagtcaaatacgccgaactcaaagcctttcagatcgcctttctcatcccaggtcagcggtcccattacggtatccacggagttcgctttcaggtatttggcgatttcagccggatcgtcagactgattcaggcccgcctgcaaagattgcagcgcggcgtaggtggtccaaacgaatgcgccacttgggtcctgttttttcgctttgatcgcgtcaacaatgggtttgttcgccggaacctgatcgtagttcttcggcttggtcaccagcagcccttccgcactttcgcccgcaatgttagacaggctaacgttagccacaccttccggccccataaactgagttttcagccctgccgcgcgtgcctgacgcaggatttgccccatttccgggtgataaccgccgtagtaaacgaagtcgatattctcttttttcagacgcgccaccagcgtactgaaatctttttccccggcggtgatgccatcaaagaacaccacgtttgcattgcctttcttcaggccgtcctgcaccgctcgcgccagaccttcgccgtattgctgtttgtcgtgaacgatagcaatacgctgcggtttcactttctcaagaatatatttcgccgccgtcggcccctggtcggagtccaggccggtggtgcgcaggatcagctgatagccacgggcggtcagctccggcgcggttgccgctggggtgatcattaaaatgccttcgtcttcgtagatgtcagacgcaggctgcgtactactagaacagaggtgaccaatcacatatttaatgccgtcgttaacgactttgttcgccaccgcaaccgcctgtttcgggtcacaggcatcgtcatattttacgatttgcagtttgttgcctttaatgccgcctttagcgttgatatccgcaaccgcctgctctgcgccggtaaactcctggtcaccgtactgcgcaaccggaccggacattgcgcccacgaccgcgactttaatatcttctgccagagccatattgctgaatgccagcgcgatacatcctgccagtaacgctttaccctttatgttcatcctgagaatccccattcttctggttattacgtgtgttgtgatgttgtttttcagcactttatttcgttttatgcatgactacccgtgctttagcagcatactctgctaaaacatacccgatttttatgatattggaatagctattttgacagtttattaacaatctgcgtggggattggcgttttgccggaggggaaattgattattacagaggcccaaaaaacaaaaaccccggactctcatccagggttctctgcttaatagcggaaattacgcttcaatggcagcacgcaattttttcatcgcgttcttttccagctggcgtacacgctcagcggaaacgccgtaacggtcagccagttcctgcaacgtggacttgttgtcttcgtccagccagcgcgcacggatgatgtcctggctgcgttcgtccagaccctgcatcgcgtcggtcagacggtttgccgcctgctcttcccagttatcatcttcaatgccgtcggcaaagttagaacttttatcctgcagatagagcaccggagccatcggctggctgtcggaatcgtcgtcggaagacaggtcaaaggtcatgtcctgtgccgccatacgactttccatctcacgtacgtctttgctggttacgcccagttcacgggccaccatttcgacttcatcctggttaaaccagcccagacgctgcttggttttacgcaggttgaagaacagtttgcgctgcgctttggtggtcgcaactttgacgatacgccagttacgcagaacgtattcgtggatctctgctttgatccagtgaacggcgaaggagaccaggcgcacacccacttccgggttgaaacggcgcactgctttcatcaggccgatgttaccttcctgaatcaaatccgcctgtggcaggccatagcccgcataattacgagcaatatgaacaacaaaccgcaggtgagacaggatcagcgttttagctgcttccagatcgccatggtaatgcagcttttcagccagcgcccgctcctcgtcagcgctcaacatcggccacgcgttagctgcccggatgtaggaatccaggttgccaactggggctaaagctaaactttgcattttgtcagtcattcaaatcctctcaatcgatatcttctggcgcttcagtggtagcaacaactgtgccagagcttaagagcaacgaggttatcattcactgttttatcagaccgtgattttatccacaagttcaatgcaagcttgtgaataaattacgcacaaaatgtgacatagagatgaaataccgggaagagacaacggggtctctttccctgctacggaacccattgcagggaaagagtataacacgcttttattattcaggcgtaaagtggcgtaaatgttgtaccgtggcaagccacgctgccacccagccaatcatgctgcataccagcagcaatagcaggcattcatcgaaacttaagccattgatatcaaacttcgttccgaaaacctgtgccacttccgcaaccgcgctactcaatcgcagcaccagaatttcactcaaaattaaactcaacaatgcgccagaaaatcccagcagtgcgccaccatacaggaacgggcgcaggatgaatccatctgtcgcaccaatcagtttctgtacgttaatggagtcacggcgagcaaagatactcagacgcacactgttaccgatgacgaggaacacggccgccaccatcaacacgccgatcatcgcgctaacgcgcccgaccagcccggtcaacgccgccagacgggcaaaccagctgtcatccatccgcacttcgtcaatgccgttaatctgcgtgatacgatcacgcagcgtattcagactttccgtcccctggaaatcgagtttcgggatcaccaccgccactgccggaagcgggttttcttccagcatatccagcgcaccaccaaaaccagaccagttacggaactcacccagtgcgtcttcacgagaaagatagttcactttctccacgccttgctcggcctgcaactgtgccaccacgcccgcagcagcgtcatcgtccagcgttttttgcagataaacagtgatttgcggactcggataatactgcgtcgccgcctggttaacgtttttgtacaccatataacagacgctgggcagcgtcagagaaatggcgataaccatcaccgttaaaaacgtggcgaacggtttgcttttcagatcctgcaatgcgccgtggaaggcatagcgcacctgttcgttgaaaacgttggttttgcgatttaccggttttgggctggatttcgcgcgttttggtgcgttacgaccgccgtcgccactgccgccgacgcttttacggaagcgatcaagacgcccgccaaactgccgaatatgattgattgcatcgcgcttattcatggcccacgcctccatgcaagtgaccatcgctcagggtgagcatgcgataggaacgccggctgatcaggttgatgtcgtgcgttgccatcaatacggttaccccaacgcggttaaactcttcaaacagacgtaaaatgccttcgctcagcgcgtcgtccaggttaccagtcggttcgtccgccagcagtaccgcgggcttgttcaccaccgcgcgggcaatgccaacacgctgttgttcaccgccgctaagctgaatagggaagttcttcgctttgtccagtagcccgactttatccagcgccgcgctcacccggcgacgaatatcgtcaccgctggcaccggcgataatcagcgggatcgccacgttatcgtagacagtacggtccatcagtagatggtgatcctggaaaatcatgccaatctggcggcgcagaaacggaacttcacggtttttcagacgcgtgatgtcatggccgctaaaccagattttcccggcgctgggccgctcaatcccacagatcagcttcaggagggtacttttccctgcgccggaatgaccggtcagaaacgccatctcacccggctgcatatggaacgtaacgccctgcagcgcctgtctcccaccgagataagccttgctgacatgttcaaagcgaatcattgttaatcctctcgggcaaaaagtgcctctataaagtcgtccgccttaaacggacgcaaatcctcaatacgttcgccgacaccaatgtagcggatagggataccaaactggtcagccacgctgaaaattaccccgcctttcgccgtgccgtccagtttcgttagcgtgatgccggttaagccaacggcttcatggaacagtttggcctggcttaccgcgttctgcccggtgctggcatcaatagtcagcataacttcatgcggcgcttcaacgtcgagtttcttcatcacgcggacgattttcttcaactcttccatcaggtggcttttgttctgcaggcgtccggctgtatcggcaatcaggacgtcgatattacgcgctttagctgcctgaatggcgtcgaagataacagaggcggaatccgccccggtatgctgggcaatcaccggaatattgttgcgctgaccccagacctgaagctgttcaaccgcagctgcacggaaagtatcacccgccgccagcatcacgcttttaccctgctgctcaaactgacgcgccagcttaccaatcgtcgtggttttacccacaccgttgacgcccaccatcaggatcacaaacggcgctttgccttcaacattcagcggctcatcgactttcgccagaatctcgcccatctcttctttcagcaggccatagagcgcctcggcgtcacgaagctgcttgcgggatgcgccttccgtcagattggtgataattttacgtgtggtttccacacccacatcggcgatcaaaagctgctcttccagctcctcaaacagatcatcgtcgatttttttaccgcggaacaggctgataaatccggaaccgagattttctttggtttttaacaggctgcgtttcaggcgcgcgaaaaaaccttctttggtcggtttttcctgctcctgagcgatttcttccaccggctgctcttcttctgccggaggaaccaccatcaccgcctcttctgccgcttcggcagccagcgccgtttccagctcttcgtcggtaatttcttctttagccgcttcttcttccgccgcttcgacaatctctacggtttccgcttcagcctgccactcttctgggctaaccgcttcggcgttgacgtcttccggcaacggcagctcttcacgttcgatagccactggctccggcgtttcttctacgaccggttccggctgtgcaacgacttccgcttcaggctgcgctttttcactttcagcaacctgttcagtgacttccacaacgtcggcagcaaaagtttccgcctcggcttcagtatgcgcttgcggctgctcttcaacggcttgttcagaggccttcacaggctcttgcgcctgaacgatttcttctacaaccggttgttcattctgaacttctgtctctttttccggggtctgctctttttgaccaaagcccagccaggaaaaaaagccacgttttttttctttcgccatttgcgactacactcctcgctgttgcttcatggcacagcgttaacgctatgtacatagcagctaaaaaaatgatgaaatagtctatcacttaacttaattcacatcaccgcctgcaagtatgtgttatctggcggattgagcaatttatcatgaaaaaaccgaatcattccggcagcggccaaatccgcattattggcgggcagtggcgaggccgtaaactcccggttcctgatagcccaggtctgcgccccaccaccgaccgcgtacgcgaaacgttgtttaactggctggctccggtcattgttgacgcccaatgtctggattgcttcgccgggagcggcgcgctggggctggaagcgttaagccgctacgctgcgggggcaacgttgattgagatggatcgcgcggtttctcagcagttaattaagaatctggcgacactaaaagcaggcaatgcacgcgtggtgaacagcaacgcgatgagtttcctggcgcaaaaaggtacaccgcataatatcgtgtttgtcgatccaccgttccgccgtggcttgttagaagagacgataaatttactggaagataacggctggctggctgacgaagccctgatttatgtcgaaagcgaagtcgaaaacggtctgcccactgttccagcaaactggagtttacatcgggaaaaagtggcgggtcaggtggcttatcggctgtatcaacgcgaagcacaaggagaaagtgatgctgattaatattggtcgtttgttaatgctctgcgtttggggatttttaatcctcaacctggtgcatcccttcccacgcccgctgaatatcttcgttaacgtggcgctgatttttaccgtgctgatgcatggtatgcagctggcgctattgaaatccactttaccgaaagatggcccgcagatgaccaccgccgaaaaggtacggattttccttttcggcgtgtttgaactgctggcctggcagaagaaatttaaagttaaaaaataaccttattgttcgcctacaaagctgacaaagcgcgttcctttatagctcagcgtacctttatcgcccactgtcagggcgtggtactgctgggcgtcgaggcgaaacgtctgctccattcctccgctttgcggtttgaagcttgcctcatagcgtatactggtgcctgccggagtcacttcctgctggcggctacggcgatcgttaatcggtttttcccgcttgttgctcaccaccaccagcttttgctggagcggagccatatcattatcagctttttcccgtcgctgttgcataaaacgaaagcttgcggcgacgacaattaagccaatgataacaataaagaaaagaggtggtttgctcatctttatccctcatcggaaaatgcggaaataagcataccctgccagttatggtgttgtcatccgtccaccctcgccactaaactggaagcaagaccgtaggcattccgcttacgaaaaaataacgaattcaaggaactaagatgctttggagctttatcgctgtctgtctttccgcatggctatctgtggatgcaagctatcgtgggccaacctggcaacgctgggtgtttaaaccgttaacccttcttctcctgctgttactggcctggcaagcgccgatgttcgacgccattagctatctggtgctggcagggctgtgcgccagtctgctgggcgatgcgctaaccctgttgccacgtcaacgtctgatgtacgccatcggcgcgtttttcctcagccacctgctgtacaccatctatttcgccagtcagatgacgctctctttcttctggcctctaccactggtgctgctggttctgggtgcgctgttactggcgattatctggacgcgcctggaagagtaccgttggcctatctgcacgtttatcggcatgacgctggtgatggtgtggctggcaggtgaactgtggttcttccgtccgaccgctccggcgctctctgcgtttgttggcgctagcttgctgtttatcagtaactttgtctggctggggagccactatcgccgacgcttccgtgcggataacgcgattgctgcggcctgctactttgccggtcacttcctgatcgtccgcagcctgtatctctgataaaacttgactctggagtcgactccagagtgtatccttcggttaatgagaaaaaacttaaccggaggatgccatgagcactcctgacaatcacggcaagaaagcccctcaatttgctgcgttcaaaccgctaaccacggtacagaacgccaacgactgttgctgcgacggcgcatgttccagcacgccaactctctctgaaaacgtctccggcacccgctatagctggaaagtcagcggcatggactgcgccgcctgtgcgcgcaaggtagaaaatgccgtgcgccagcttgcaggcgtgaatcaggtgcaggtgttgttcgccaccgaaaaactggtggtcgatgccgacaatgacattcgtgcacaagttgaatctgcgctgcaaaaagcaggctattccctgcgcgatgaacaggccgccgaagaaccgcaagcaagtcgcctgaaagagaatctgccgctgattacgctaatcgtgatgatggcaatcagctggggtctggagcagttcaatcatccgttcgggcaactggcgtttatcgcgaccacgctggttgggctgtacccgattgctcgtcaggcattacggttgatcaaatccggcagctacttcgccattgaaaccttaatgagcgtagccgctattggtgcactgtttattggcgcaacggctgaagctgcgatggtgttgctgctgtttttgattggtgaacgactggaaggctgggccgccagccgcgcgcgtcagggcgttagcgcgttaatggcgctgaaaccagaaaccgccacgcgcctgcgtaagggtgagcgggaagaggtggcgattaacagcctgcgccctggcgatgtgattgaagtcgccgcaggtgggcgtttgcctgccgacggtaaactgctcagtccgtttgccagttttgatgaaagcgccctgaccggcgaatccattccggtggagcgcgcaacgggcgataaagtccctgctggtgccaccagcgtagaccgtctggtgacgttggaagtgctgagtgaaccgggagccagcgccattgaccggattctgaaactgatcgaagaagccgaagagcgtcgcgctcccattgagcggtttatcgaccgtttcagccgtatctatacgcccgcgattatggccgtcgctctgctggtgacgctggtgccaccgctgctgtttgccgccagctggcaggagtggatttataaagggctgacgctgctgctgattggctgcccgtgtgcgttagttatcagtacgcctgcggcgattacctccgggctggcggcggcagcgcgtcgtggggcgttgattaaaggcggagcggcgctggaacagctgggtcgtgttactcaggtggcgtttgataaaaccggtacgctgaccgtcggtaaaccgcgcgttaccgcgattcatccggcaacgggtattagtgaatctgaactgctgacactggcggcggcggtcgagcaaggcgcgacgcatccactggcgcaagccatcgtacgcgaagcacaggttgctgaactcgccattcccaccgccgaaagtcagcgggcgctggtcgggtctggcattgaagcgcaggttaacggtgagcgcgtattgatttgcgctgccgggaaacatcccgctgatgcatttactggtttaattaacgaactggaaagcgccgggcaaacggtagtgctggtagtacgtaacgatgacgtgcttggtgtcattgcgttacaggataccctgcgcgccgatgctgcaactgccatcagtgaactgaacgcgctgggcgtcaaaggggtgatcctcaccggcgataatccacgcgcagcggcggcaattgccggggagctggggctggagtttaaagcgggcctgttgccggaagataaagtcaaagcggtgaccgagctgaatcaacatgcgccgctggcgatggtcggtgacggtattaacgacgcgccagcgatgaaagctgccgccatcgggattgcaatgggtagcggcacagacgtggcgctggaaaccgccgacgcagcattaacccataaccacctgcgcggcctggtgcaaatgattgaactggcacgcgccactcacgccaatatccgccagaacatcactattgcgctggggctgaaagggatcttcctcgtcaccacgctgttagggatgaccgggttgtggctggcagtgctggcagatacgggggcgacggtgctggtgacagcgaatgcgttaagattgttgcgcaggagataaggcaaaccgatcgcaacattgagcgcgatcggtcccctcgcccctctggggagagggttagggtgaggggaaaaggcggcatcgaagccaatcagcccctatcaaccgcctttacgaatcaaataacgataaggcagtccatccgtctctttagcaaccagttcgtgttccataaaggtacaaaacccaggaatatcgcgggtagtggccggatcgtcggcgataatcagcaacgtttcgccaggctgcatattgcgcacggttttgcgcaccatcatcaccggttccgggcagcgcaggccaagcgcgtcgagtgtgtggtcagggctggaaaagagatcggtcattttcttctcatcacttaaaaaaacggcgctagtttacgccctgtgagtccgtaagcaaactaggttaacgattgcgtgaaaattaaccattgcattgtcaacgtaaagcagtatcatgcggcggctcgaaaaaagggtaagcacgttattatgttaaggtaacagacgtgtcgtacgtattgggttccctcaccccaatggttaatcaaaaaggtacaatatgaacgttttcagccaaactcaacgctataaggcgttgttctggttaagcttatttcatctgctggtgatcacctccagtaactatctggttcagcttcccgtctccattttgggtttccataccacctggggcgcgtttagctttccgtttatttttcttgctaccgacctgaccgtgcgtatttttggcgcaccgctggcccgacgcattatcttcgcggtaatgatccctgcgttattaatctcctacgtcatcagcagcctattctatatgggttcctggcagggattcggcgcactcgcccacttcaacctgtttgtcgcccgtatcgccaccgccagtttcatggcctacgcgctggggcaaatcctcgacgtgcacgtttttaaccgcctgcgtcagagtcgccgctggtggctggcaccgacagcgtccacactgttcggtaacgtcagcgacacgctggcctttttcttcattgccttctggcgtagcccggatgcctttatggctgaacactggatggaaatcgcgctggtcgattactgtttcaaagtgttaatcagtatcgttttcttcctgccaatgtatggcgtattactcaatatgctgttgaaaagactggcagataaatccgaaatcaacgctttgcaggcgagttaaaggttcgttatcagagttgtgataagatggatgaatgagccgttatggccgtttatcgaaaggaagaagtcaatgcgcaatctggttaaatatgtcggaattggcctgctggttatggggcttgcggcctgtgatgataaagacactaacgctacggcgcagggtagcgtcgcggaaagtaacgctaccgggaatcccgtcaacctgcttgatggcaagttaagtttcagcctgccagcggatatgaccgaccagagcggtaagctgggaacgcaggccaataacatgcatgtctggtccgacgccaccgggcagaaagcagtcatcgtcatcatgggcgatgatccgaaagaagatctggcggtgctggcgaagcgtctggaagatcagcaacgtagccgcgatccgcagctgcaagtggtaaccaataaagccattgagctgaaaggtcacaaaatgcagcagttagacagtattatctccgcgaaaggccagacggcgtactcttccgttattctgggtaacgtgggtaatcaactgctgaccatgcaaattacgctgcccgctgacgatcagcaaaaagcgcagaccaccgcagaaaacatcattaatacgctggttattcagtaagttttaagaactactggcggcctcagggacgtgttccggaggccgtttttttaatcgccacgtcagtaataacgcgattgcgaccagtcccgccgccgccagataaatcaccggtacgcccgcccagctcatcaccagcccagccagtggtccagtcacgccaaggcttaaatccataaatacggtgtaagttgccagcgccgccccctgattttgctgcggaaccgcttttaccgccactacacccaatgccgggaacaccaggctaaacccggcccccgccagtaagacgccgattttcgccatccacggcatagtcgccacgccaaccagtagcaggccgattatctcaacgctaaagcaaatcatcgctacgtttaagccaccgatacggttaatgccgttagggaataacaaacgcgtaccgacaaacgcacagctaaacagcgtcagcgcgaaagccgcaccgtcccaacctttagcgtcataaaacagcgtgataaaggtggcgatgacgccaaatccggcggaagccagtgccagcgccataccgtacagccagacgcgcccaagcaccgcgcgaaacggcagcggtttgcctttactggcttttaccgtcggacgcgggatcgccaacaaaatggccaccagcgccacgcccataatgattaacgctaacgcctgcaagccgccccagtgataaaacacgacgcctaacggcgcacccatcgccatcgccccgtaagtgacaatgccgttccagctaatcacccgcccgatatgcaggctgccaaccacgccaacgccccatagggtgcttcccgttccggcaaaactttgcccaatcccaaggatgacgcgccccaggcaaagtaataacaggctgatgacaggcagactggcggttaatcctgccgtcagataccccagaccgctcaaaaagcagccgcataaaccgaagacgacaatctttttgggtcccaggctatcggcgtaacgtccggcatgagggcggctcagcaaggtggcgaaatattgcaggctgataaccaatcctgcccagaaggcgctaaagcccatcacatcatggacatagcccggtaatacagcgagcggcaacccgatggtgaggtagctggcgaagttaaacatgactatagagacaatgcgcaaattcaggcgcaatccgtttagcgcgggttcggctacgggttcgggcatgaggatcaccacatttttacaacagtgtttcatttttaccacgtgctgacgtgaaaatcagcagtaagaatcagaatattgctggcgtgactcccgctacacttaatacaaaaagtcacaaggaagccccaatggaaacccctcaacccgataaaacgggcatgcacattctgctcaagctggccagcctggtagtgatcctcgcgggcattcacgcagcggcagatatcattgtgcagctgttactggcgctgttttttgccatcgtcctcaacccgctcgtcacctggtttattcgtcggggagtacaacgccccgttgccattacgattgtagtggtggtgatgctgatcgcactaaccgcgctggtcggcgtactggcggcaagctttaacgaatttatctctatgctgccgaagtttaataaggagctgacgcgcaaactttttaaattgcaggagatgttgccttttcttaatttgcatatgagcccggagcgaatgctgcagcggatggacagcgaaaaagtggttaccttcaccacagcgctaatgaccgggctttccggggcaatggcgagcgtgcttttgctggtgatgaccgtagtttttatgctgtttgaagtgcgccacgtcccttacaaaatgcgttttgcgctgaataatccacagattcacatcgcgggattacaccgcgcacttaaaggcgttagccactatcttgcattgaagacgctactcagtttatggacaggtgtcatcgtctggctggggctggagctgatgggggtgcagtttgcgctgatgtgggcagtactggcgtttttgctcaactacgtgcccaatatcggcgcggtaatttccgccgtaccgccaatgattcaggtgctgctgtttaatggtgtttacgaatgtattctggtcggcgcattgtttttagtggtccatatggtcatcggcaatattttagaaccacggatgatgggccatcgcctggggatgtccaccatggtggtatttcttagtttgttaatttggggatggctgctcggcccggtagggatgctacttagcgtgccattaaccagcgtgtgtaaaatctggatggaaaccaccaaaggcggtagcaaactggcgattttactggggccgggcagaccgaaaagtcggttaccgggatgaggcgacaagtgatacgatacgcactttcattttccattaaacgttggccctgatatgtatcggatagttctggggaaagttagcaccttaagcgcagctccactgccaccgggtttacgcgagcaagcaccgcaaggtccacgacgcgaacgctggctggcggggcgtgcattgcttagccacacgctttccccgctaccggagatcatctatggcgaacaaggcaaacctgcatttgcgccggaaatgccgctatggttcaacttaagccatagcggtgacgatatcgccctgctgttgagtgatgaaggcgaagtcggctgcgatatcgaagtgattcgcccgcgcgccaactggcgctggctggcgaacgccgtattcagcctcggggaacacgctgagatggacgccgtgcatcctgatcagcaactggaaatgttctggcgcatctggacgcgcaaagaagccatcgttaaacagcgtggcggcagcgcctggcaaatcgtcagcgtagacagcacctatcactccagcctgagtgtcagccattgtcagcttgaaaatttaagccttgcgatctgcacccctactccctttacgctcaccgccgacagtgtgcaatggatcgatagtgttaactgatccgcccacccgactgcccatctattgatccagaacaggtaatcagtatgacgaatacttaaaatcgtcatacttatttccgccatctattttaatccattggggttaccatgctctccacactccgccgcactctatttgcgctgctggcttgtgcgtcttttatcgtccatgccgctgcaccagatgaaatcaccaccgcctggccggtgaatgtcgggccactaaacccgcacctttacacgcctaaccagatgttcgcccagagcatggtttatgaaccattggtgaaatatcaggcagacggtagcgtgatcccgtggctggcaaaaagctggactcatagtgaagatggtaaaacctggaccttcaccctgcgtgatgacgtgaaattctccaacggtgaaccgttcgatgccgaggcggcggcagaaaacttccgcgcagtgctcgataaccgtcaacgtcacgcctggctggagctggcaaaccagattgttgatgttaaagcactcagtaaaacagagctgcaaattaccctgaaaagcgcctactatcctttcctgcaagaactggccctgccccgtcctttccgttttatcgctcccagccagtttaaaaaccatgaaaccatgaacggaattaaagcgccgattggcaccggaccgtggattttgcaggaaagcaaactgaatcagtacgatgtcttcgtccgtaacgaaaactactggggcgaaaagccagcgattaaaaagatcacctttaacgtcatcccggacccgactacccgcgcggtggcgtttgaaactggcgatatcgacctgctgtacggaaacgaagggttattaccgctcgataccttcgcccgctttagccagaatccggcttaccacacccaactgagtcagccgatcgaaaccgtgatgctggcgctcaataccgccaaagcccccaccaacgagctggcagtacgtgaagctcttaattacgcggtaaacaaaaaaagcctgattgataacgcgttgtatggcacccagcaggtcgccgacaccctgtttgccccttctgtgccctacgccaacctcggcctgaaaccgagccagtacgatccgcaaaaagcgaaagcgttgctggaaaaagccggttggacgctgcctgcgggcaaagacatccgcgagaaaaatggtcagccgctgcgcattgaacttagcttcatcggcaccgatgcgttaagcaaaagcatggcggaaatcattcaggctgatatgcgccagattggcgcagatgtcagcctgattggcgaagaagagagcagtatctatgctcgtcagcgcgacggtcgttttggcatgattttccaccgcacctggggcgcgccatatgatccacacgccttcctcagtagtatgcgcgtaccgagtcacgctgacttccaggcacagcaaggattagccgacaaaccgctgattgataaagagatcggcgaagtgctggcgacccatgacgaaacgcaacgtcaggcgctgtatcgcgacattctgacccgtctgcatgacgaggcggtttatctgcctatcagttacatcagtatgatggtggtaagtaaaccggagctgggtaacatcccctacgcgccgatcgccaccgaaattccgttcgaacagattaaaccggtgaaaccttaatgttgcgttacgtattacgccgctttctgctgctgatcccgatggtgctcgccgccagcgtgatcatttttctgatgctgcgcctcggtaccggcgacccggcgctcgattatttgcgtctgtctaacctgccgccgacgccggagatgctggcctctacccgcaccatgctgggactggatcagccgctgtacgtccagtacggcacctggttgtggaaggcgctgcatcttgactttggtatcagtttcgccagccaacgcccggtactggacgatatgctgaacttcctgcccgccacgctggaacttgcaggtgcggcgctggtattaattctgctcacttccgtaccgctcggtatctgggcggcgcgccatcgcgaccgtctgccggatttcgccgtacgtttcatcgcgtttcttggcgtgagcatgcctaacttctggctggcgtttttactggtgatggcgtttagcgtgtatctgcaatggctacccgcgatgggttacggcggctggcagcacatcattttgcctgcggtttccattgcctttatgagcctggcgattaacgcgcgtttactgcgcgccagtatgctggacgtcgccggtcagcgtcacgtcacctgggcgcgtctgcgcggcctgaacgacaaacagaccgaacgtcgccacatcctgcgcaatgccagcctgccgatgatcaccgccgtggggatgcatatcggcgaactgattggcgggacgatgattatcgaaaacatctttgcctggccgggcgtcgggcgctatgcggtgagcgcgatttttaaccgtgactatccggtgatccagtgctttacgctgatgatggtggtggtttttgtggtctgtaatttgattgtcgatttgctcaacgccgcgctggacccgcgcattcgtcgtcatgaaggagcgcacgcgtgaactttttcctctcttcccgctggagcgtacgcctggcgctgatcattatcgccctgctggcgctgattgcgctcaccagccagtggtggctgccgtatgacccacaggcgattgatttgccgagccgcctgcttagcccggatgcgcagcactggctgggcaccgatcacttaggtcgcgatattttcagccggctgatggcagcgacccgcgtgagcctcggtagcgtaatggcctgcctgctgctggtgctgacattagggctggttattggcggcagcgccgggttgattggcgggcgcgttgatcaggccaccatgcgcgtcgccgatatgtttatgaccttcccgaccagcattctgagcttctttatggttggcgtgctcggcaccgggctgaccaacgtaattatcgccatcgccctgagccactgggcgtggtatgcacgcatggtgcgcagcctggtgattagtctacgccaacgcgagtttgtgctggcgagtcggctttccggtgcgggccatgtgcgggtgtttgtcgatcatctggcaggcgcggtgatccctagcctgctggtgctggcaacgctggatatcggccatatgatgctgcacgtcgcggggatgtctttccttggcctcggtgtgaccgcgccgaccgccgaatggggcgtgatgattaacgacgcgcgccagtatatctggacccagccgctgcaaatgttctggccggggctggcgctgtttatcagcgtgatggcctttaacctggtgggtgacgcactgcgcgatcatctggaccctcatctggtgacggagcacgcacactaatgccgcaacagattgaactacgtaatatcgcgctacaggccgcgcagccgctggtacacggtgtaagcttaaccctgcaacgcgggcgcgtgctggcgttagtcggcggtagcggcagcgggaaaagtttaacctgcgccgcaacgctgggcattttgcccgctggcgttcgccagacggcgggggaaattttagccgatggcaaaccggttagcccttgcgccctgcgcggcatcaaaattgccaccatcatgcagaacccgcgcagcgcctttaatccactgcacaccatgcacacccacgcgcgggaaacctgcctggcgttagggaaacccgccgatgacgctacgcttaccgctgccatagaagcggtggggctggaaaacgccgcgcgcgtgctgaagctgtacccgttcgagatgagcggcggcatgttgcagcgcatgatgattgcgatggcggtgctgtgtgaaagtccgtttatcatcgccgatgaaccgaccaccgaccttgacgtggtagcacaggcgcgcatcctcgatctgctggaaagcattatgcaaaaacaagcgccgggaatgctgctggtgacccatgatatgggcgttgtggcgcgtctggcggatgacgtggcggtgatgtctgacggtaagattgtcgaacagggcgatgtagaaacgctgtttaacgcccccaaacatacagtgacgcgcagcctggtttccgctcatctcgccctctacggtatggagctggcaagttgacctaatacggtatggagctggcatcatgactttacttaacatctccggcctttcccatcactatgcgcacggtggatttaacggaaaacatcaacatcaggcggtgctgaataacgtttccctgaccctgaaaagcggcgaaaccgtcgccctgctggggcgcagcggctgcgggaaaagtaccctcgcgcggttgctggtgggtttagaaagccccgcgcaggggaatattagctggcgtggcgaaccgctggcgaaactcaatcgcgcccagcgtaaagcgttccgccgcgatattcagatggtatttcaggactccatcagcgccgtgaatccgcgcaaaaccgtgcgcgagatcctgcgtgaaccgatgcgccacctgctaagtctgaaaaaatccgaacaactggcgcgcgccagcgaaatgctgaaggcggtcgatctcgatgacagcgttctcgacaaacgcccaccgcagttaagcggcggccagctccagcgcgtctgcctggctcgcgcgctggcggtcgaaccgaaactactgattctggatgaagccgtttctaaccttgatctcgtgttacaggcgggtgtcattcgcctgctgaaaaagctacaacaacagtttggcaccgcctgcctgttcatcacccacgacttacgcctggtagaacgcttttgccagcgggtaatggttatggacaacggacaaatcgtcgaaacccaggtggtgggagagaaattaaccttttcctctgacgccggacgtgtgctacaaaacgcggtattacccgcattccccgtgcgccgtcgcaccacagaaaaggtttaacgcaaatgcaacgagtcaccatcacgcttgatgacgatttactggagacgctggacagcctgagccagcgtcgtggttataacaaccgttccgaagctatccgcgacattctgcgtagcgccctggcgcaagaggccacccagcagcacggcacgcaaggtttcgcggtgctgagctatgtgtatgaacacgaaaaacgcgacttagccagccgcattgtctccacccagcatcatcaccacgacctctccgtcgccacgctgcatgtgcacatcaaccacgacgactgtctggaaatcgccgtgttgaaaggtgacatgggtgacgtgcagcattttgccgatgacgttatcgcccagcgcggcgtgcggcacgggcatttgcagtgcttgccgaaggaagattgagttacgccattgtcccaatcgtcttcctgaatcgcagcagcgcaatggtgaaaaatgcgccgccaattgccatcagcgtcagaaactgcggccagacgatttcgaatccggcaccccggtagaggatggcctgcgcgaggctaacaaagtgtgtcgtcggcatggtcagcataatgtcctgcaccatctgcggcatactttcgcgcggcgtggaaccaccggaaagcatttgcagcggcagcagcaccagaatcaccagcagccccagttgcggcatactacgcgctatcgtccccataaaaatgccgatactcgtggtggcaaacagactgagcgccacgcccagcataaacagcgggatgctgccttcaatcggtacgcccagtacacctttcaccatcagcaccaggcttaatccgcttaccaccagcaccaccagccccatgctccagatcttcgccatcatgatctcaaacggcgttatcggcatcaccagtaagtgttccaccgtgccgtgttcacgctcgcggatcagcgcgcttccggtcaatacaatcgccagcatggtaatgttgttgatgatcgccatcaccccgccaaaccacgcgggatcgaggttcgggttaaagcgcatccgggtttccaggcttaccaacggttcgctgttatcacggtagcgcgcgacaaagctgttcacttcaccgttgataatattctggatatacccattgccggtaaatgcctggctcatgcgcgtggcatcgacgttcacctgaatatccggctggcgtccggcgaggacatcacgctgaaaattaggcggaatatttatcgcgaaggtatagcgtccggcgtccagtccggcatccatctcatcggcggtgatcatctccggtggcaaaaaccacggacgatagaagctgttaacgatccggttgcttaactggctttgatccatatcggcaatggcgatcggcgcgaggttcaagcttcctggcgtaacggtcgcactgctatacacgctcaccgtaaagctgaagacaatcagcgtcagcatcgctttatcaccgagcagactgcgcaactctttgatacccagattaaaaatattgcgtaaatggcgcatcatccctcctgttttttcagcagcaggatacttaagcccatcaccagcgggatggctatcagtaacgggataaaaagttgccacaaatcagtcagatccagcgctttgctgaacgtcccgcgggcgatagtcagaaaatgactggtcgggtaaacctcgccgatccaacgtccaggcccttccaggctagctaccggatcgatcatcccggaaaactgtgtcgccgggatcaacgtgataatcgccgttccgaaaatggcggcaatctggcttttcataaaggtggagatcagcagccccattccggtggcaatgatgatatacagcagcgccgccagggtgagcgtcaggaaactgcctttatgcggtacgccaaacacaaacacgctcaggccgcagagcaggaaaaagttcagcatccccagcgcgatgtatggcaactgtttaccaagcaaaaattcactacgcgtggtgggggtcacgtaaaggttgataatgctcccaagctctttttcccgcaccacgctaagggcgcttagcatactcgggatcatcatcagcagaagcgggatcaccgccggaacaatcgctggcaggctttttacgtccgggttatagcgatagcgcgtctcaatattcatcagcccgctttggctggcgggtgtgctttgtcggctcgccacatcctgtaaccagctctggtgcatggcctgcacgtaaccttttaccgtttcagcacggctcggcatcgctccgtcgatccagacgccgagttccacaggcgtaccacgcgcgatatcgcgcccgaaattgggcgggatctcaatcgccaccgtgatatcgcccgcacgcatccgacgatcaagctcgtcataactggtgagcggcggctgttcgataaagtaacgggaaccggagaggttgagtgtccacgcctggctactgacggtctggtcgcggtcgagcaccgcaaagcgcaggttttccacatccatactgatgccgtaacccattatcagcatcaggatcaccgttcccatcagcgccagcgtgctacgtactggatcgcgtcgcagttccagcgcttcgcggcggctgtagctaaacagacggcgcaggctaaatccctgacgcggcgcgtgggtggtgtcgtgtaccacgggcggcgcttcggcttcgttgctctgccctgccgcttcctgcaaataggcgataaatgcctcttccagactggcggctccgcgtttctcaaccagttcctgcggtgtaccgctggcaagcacttttccggcgtgcatcagactgatgcggtcgcaacgttccgcttcgttcataaagtgggtggagatgaagatagtcactttgtcctggcggctgagatcgaccatcaactgccagaacatatccctcgccaccggatcgacaccagaagtaggctcatcgaggattaacatctccgggcgatgaatcaccgccaccgccaggctaagccgctggcgaatgccgagcggcaaactctccggcagaatatcttcaacgtcgttgagcttaaaacgctcgctcatttcagccactcttgcgggaatttccgcttccgggatgtgaaacaaacgggcatgtaactcaaggttttgccgcacggtgagttcgttatagaggctaaacgcctggctcatatagcccacccgacggcgggtatcgatatcttttggatcaaccggttgcccgaacagccacgcctcaccttcgctggcgggcagcagtccggtgagcattttcatggtggtggatttaccgcagccgttgctaccaagaaaaccaaaaatctccccgcgtggaatgcggaaattaacgtgatcaacggcaacgaaggaaccaaaacgcatggtcagatcgcgcgcttcgatggcaatctctgcgttttcaggttgatacggtgggatcactaccgcctgatgcgcctggcgttgcgcttgcggtaacagatttataaatgcttcttccagcgtagcgctttgcgtttgctgccgtagctcttcggcgctgccagttgccagcacttctccggcattcatcgctaccagccagtcgaagcgttcggcctcttccatataggcggtggcgaccagcacgctcatattgctctgccgctggcgaatactgtcgatcagatcccagaactgggagcgggagagcgggtcaacccccgttgttggctcatcaaggatcaacagttccgggtcgtggattaacgcgcagcacagcccaagtttttgcttcatcccgccggagagtttccctgccggacgatcgcgaaacggtgctaacccggtgctggtcagcagctcattgattcgcacttcccgctccgctttgtcgtgaccgaacaggcgagcgaaaaaatcgacgttttcatacacgctcaaggtgtggtagaggtttttgcccagcccctgcggcatccaggcgatgcgcgggcagacgtcgcggcgatgcttcgggtcgcgcatatcgccgcccagcaccatcacattgccctgttcaatgacgcgggcaccggaaatcaagctcaacaagctgctcttcccgacgccgtccgggccaatcagcccgaccatacagcgggccggaatatcgagagtgatattgttcagcgcaacggtttttccataatgctggctcacgcccgccagttgcgcgacaggcgggacgggaaccagttccagatgcgtcattgcggcaacctcaccacgaggtcgtcaggccacggaagttcttcattcacccgcacccacgctacgcccggcaaaccggttttgacatattccagatgctgctggagtaattccggtgggatacgcgctttgacgcggaacatcagtttcagccgttcatcgctggtttcgacggtttttggcgtgaactgggcgacactggcgacaaaactgatggttgcaggaatacgcagatctggcgcggcatcgaggatcagccgggcttcaccgcccagtttcagcgtgcccgcctgttcggttggcaggaagaaagtcatatagacgtcgctgagatcgaccatattcagcacccgaccgcctgccgccagcacttcgcctggctcggcaacccgatactgcacgcgtccgtcacgcggggctttcagttcgctgtcatcgatatctgcggcaatgcgccgttcagtggcttgtgccgcttcgacgcgggtttgcgcctgaatgatattggtgcgtgccgcttctatagccgctttagaagcgcttacctgagctttcgcgctttccagcgcagctcgggcgctctcagcggcggcgcgatcgtcatccagctgttgcgcagaaatagcccctcgttgggccagactacgggaacgcgtatgacgttttgctacggagtccagttctgcctggcgttgattaaccaggctctgtgcggcacgagtttcgctttgtcgttgctccagcaaagcctgcgcggcagcaacggcgctttgtgcctctttgatttgcgcgatggcttccagtcgctgttcctgcaacacgcgagtatccatcttcgccagcacttcaccttcgcgaacaaacttgccttctttcaccagaatggtgtcgatacgcccggcaattttgctggcaatatccacttccgtcgcttcaatgcgcccattactgacagcaaagccttccggcacacctgccgggcgcaacagccaccacgccacgatagccgccaccgccagtaacccgacaacccaccacgccagatggcgcttactcttatccataatcgacccgccataatccctgtaagcaaacgacgcgtgttacaactgccgccgaacgacgttcagcggattcttccatccgggataagaaggaaacggcaaatacgaccagcgcgcagagcattgagcgccaacggggaaggcttagtgaaaacgggtagtaatgttgtcatcatcagcattcctggccgtaaatgaaacacgcatactcataagtgtgatctataaaactggctgacaaaacggtatccatcctgttggatagcgtttcacgcctgttcagttgcaggaacagagcattcctttttacgttttatcaacagtctcaaccagatagtaacattaatattcatgttgtctatggttcagagctgtaacattgtgcgccttctaatcaaaggcataagtccatttctgtttttttcatgctggtaagacttccagggagtggttatctcaggccctgcaccagggttaatttggcaattatgcatgctgaacattcttccagcatgtttactgtcacgggcgttaagacctaaaactgtccccgtttcgcctatgcgttctcttccaccatttccgttatgtgcaacaacttgatttatacctaacatttgactacatgctaatagtgcttcaagtttaggtctgtaatctgtgctaacagaaaaataacgattaaaggatcgacaagagatagcccggctagttttaaactttttgccattaattatagcatgatgctttttattgataattgccgctaattcgaccggatcgagagcattggtcatttcatcaatagagactgttatcggtcctataatgtaacgttttcgctgatcatcaaaagttatcccatgatgatttgccattattttgtatttggggtcatagaaacatacaggataatcttttatcccagagtaggtatcctcatcgagtggtttcatacgcgtgaagttctgcatatagttaccattgcaattcgtttcatgatttccagctaatacatgaacattttcattgatactcattatgcgttttaacaaatcgatgataaattgatcaccacagatattgctaaatcgatcgccggtttggtcgcccagaaacgtacatggcgtcacagcgtctttattaataactaaataaggctgaagactttctaaaataatgtctcttctgttcaggatactgattattgtattaacattagtgttaagttgctcattaaagttctcccttagcaatacgttgagaacttcatcttctatattaagcaactggctaaggaaattttctccttcagccatgattcccaaatgtcccgttgcgaaaagcgcgaacaaaactgcaccgacactgccatcggtatcaccaaaataggttggtctggtacttgtgggatcaacgggtaaacaattggagaaatagattctgtcagcgaactggggttttatcattgtttcgaatttaatatcagatacattatattggcttattttccagttccagatgggtttgtagctctcagtaactgcaacatcattagcattatcatttactgtcatattattaagtaaataaacaatactgcaccaattaatatcggtattatcaagagagcaaccgtaatttttgctattaattgtcacaataaactgataattattattcctacgtagaatatgagcacgcatgccgcttagcatactatatttttcactatgatccgtttgtatggtaaaactaattttgtcatcttgaatagattgttggaaccgttctatttgccaatcatctattttttccacaacctcaccgagcattgtcctggcaatactacttatatcatcacctataccatttgcaatatacccaaacagttctttagtgaagttggtaacatgctcttgcaccatatcatttgttgcgattgtcgttgtactgtcgttagtgcctgccacagttccaattttcatattttacctcatattatttaccgcgaggaatacatagttaacattttatcttatgacatacacctcatgttcgatgggaaaataattatattttgcacaaatcattcagcctcaaagcataatatgaaatttcttatctcatagcagagaaagtccctaaagattgtagaggcgtcatcagaacatgcctctacaatcgattaagaaaacctatgaaatactggcaggattaaaaagacataccaccgtattcatggagttttaatgtagttgaaaacaactaagcccactggaataaattattttattatttttatcacgtgcttccttcagggaatttagccccataataccattatcaaattgttgattatgatctaccccgggcccatgatgcccatatttttgtctaatgtatttgctggggtcttcacctttgagtgtctccccacatatgaagatacgttcacgtgctggtctgaaatcagtagtgttatcaaaataattagcatatacaggtgtgggtttcaaagtattgcttcggattagatggaatagaggatcatccatgtgttctttatgttttttattaaaaatattggctaattcctcaggatcagtaggatttttcatctgattaaatggaacctgcaaagcacgctgacaataacatttttttcttcatctcttattattccgtgatgactggttaaaacttgcctttcactgtcataattacaaacatcgagcgttttaattaagttatacgtatcaccggcagagagtttatgatttgctagtcgtgcagtatagttaccattaaaattgatttcatgatttccagccagaacgacgacatttttattaatacggctatctttattaccctccatatttcgcatagaatttagcaaagtaaggatatatttatcaccaaaaatagtactaaatctatcgcctgtatgatccccaaggaagatacaaggggttatcgcatcgtcctttaaaaaaacatgttgatgcaactcattcaagatcatgtctctcgtatttaataaatcgtagagcactttattatttttatgtttgtatgcagaactagccatctcttcgtgttttaataattcacataataaactccaacccttttccctgatgcctatatgcccactaacgagcaatgcataaagtacagcgcctactcttccatctgtatcgccaaaataagccgtgttggcattttgtgggttaatcacaccacactgtttatagaagtctattttactaaacacagatttaacatagctatcaaacttttccttagtaaacgtctctttagagacatcccaacgccagtcaggtttgaaattaccactaagaagagtaaagaaatttctcgctatgatagaaagcccatcaactttataaattatatcacttttatctccagaggaattaataaaataataaccgcccttacactcaacagtaacggtaatgggagagcttaattttaacacatggttattgtctggtataattgtaaagataaacgtatcagtagtattgtcggcgaatctattatattcttgaatatctatagaaggttcactattataaaaccatactttctccatctggtgactacgatcatttaccttccagtgaccatgttgcaggaaatagatgatatgcaggccaaaatcgttatctatttggctatcattatccagtttatcaaattcaactatctttgcacgatgtgttttatcaaccttgccatggtgttgatgactgttaactttatcactatgcttatcttgatggctactagagatgtttctaatctgattgtcaattgctttcataaataacctgtgatatttttgaattgtttgtaacaaaataaatgatacttgtctgaaaaacagatttacgacgatataaaataataatacttatatgttcgctgattttaagcaccgagactatccggtcttttaccaaataatgaagaataatccctccctggaagataattgtaaaaaacaacagcataagaattaatcttaggataaatttttatttatcatggccttttgaacgctgaaaagtagcgctctgcaaagtaaaccccgctatagttatgctatgcatttgtctttaatgatatctcgtcattatattaacaggatgaaattatcattaatgcatatttcaatattagcagggatacctgaggagtttaaagtgaacatatatatcgggtggcttttcaaattaatccctttgattatgggcttaatttgtatcgcgttaggtggctttgtgctggaaagtagtgggcaaagcgagtatttcgtcgcgggtcatgtgctgatttctctggcggccatatgcctggcattattcactaccgcatttattatcattagccagctcacgcgcggcgttaatacgttttacaatacattgttccccattattggctatgcggggagtattatcaccatgatatggggttgggcactgttagcaggcaatgatgtgatggcagacgagtttgtcgccggccatgttattttcggcgttggtatgattgccgcctgtgtaagcacggtggcagcgagttccggtcactttctgctcattcccaaaaatgcagcggggagcaagagcgacggaacaccggtacaggcttattctagtttaatcggtaactgcctcattgccgttcccgttttactcaccctgctcggtttcatttggtctattacgctgttacgtagtgctgacataactccgcattatgtcgcgggtcacgtattgcttgggttaaccgcaatctgtgcctgtctaattggccttgttgccacaattgtccatcaaacacgtaatacgtttagtactaaagaacactggctgtggtgttattgggttatttttctcggcagtatcacggtactgcaggggatatacgtcttagtcagttccgatgcaagcgcccgactggctcccggcattattcttatttgcctcggaatgatctgttacagcatattcagtaaagtctggctactggcactggtatggagacgtacctgtagcttagccaacagaataccgatgattcccgtcttcacctgcctgttttgccttttcctggcaagctttcttgcggaaatggcgcagaccgacatgggatattttattcctagccgagttctggtcggtttgggagcggtatgctttacgttgttcagtatcgttagtatattagaagcgggttctgctaaaaaataattgcaacgtaccggataaaaccagcgttgaccatttgcgtaacgctggtttttcttaggcatcatgaaataacgcagcattaatgcatagtggttaagtataaaaaacagcaaagttactgtttttttcaacctgttcatatttcataaagatctggccactgagtgagttttcaatcacctttccatccaccttatattaagcatggagggtttcagttcacgggctcattagaaaataatcacaagataaccactatcaaaattagctcatttttaatgcgactctaataattttcatctttaggaaataggtcaggagctctttgctgcaatcaaatcctgcgcacaagcccacgcactgctccacgcccactggaagttatagccccccagccagccggtgacgtccatcacttcgccgatgaagtacagcccaggcactttgcgcgcttccatcgtccgactagagagttcgttggtgtccacgccgccgagcgtcacttcggcagtgcgatagccttcagtgccgttgggttgtacgcgccagtcggtcaatgtgctaatcagtgcctgttggtcacgcacgttgagctgttttaggctaacatccgggatttgcccgagttgctgtaagcgttcaaccaaccgcttcggtagatgaaccgccagtgtgtttttcaggctttgattcggatgtgcgttacgctgctcattcaggaaggtttcgaggtccacatccggtagcagattgatgctgacaaattcccccggttgccagtagctactaatctgcaacaccgccggtccagacaagccgcggtgggtgaagagtaagttctcacggaaaacggtgccgttttcagcggtaatcacggaaggcaccgccacgcccgccagcacctgtaactcttcgagcaacggtttatgcagagtgaatggcaccagacccgcgcgggtcggcagcacgttgaggccaaattgttcggcaatcttataaccaaacgggctcgcgcccagccccggcatactcagcccaccagtcgcgatgaccagcttttcgcaaccgacagtcatgccgttcagatcaagcgtgaagcctgtttcatccttcgccacactcagcacttcgctacgcaatctgaaggtcacattgcccttctcgcactcatccaccagcatgtcgacaatctgctgcgcggagtcatcgcagaagagttgccctaacgttttctcgtgccaggcgatgccgtgtttattgaccagatcaatgaaatcccactgggtaaaacgtgcgagtgcagacttacaaaaatgcggattctggctcagataagcgcctggttcgacataaaggttggtaaagttgcagcgcccaccgccagacataaggattttgcgccctggttttttaccattatcgatcagcagaacccggcgtcctgcctgacctgccagcgcagaacagaacatacccgccgcaccagcgcctataataatggcatcaaacctttccacgttgcgctcctcttagaaaaaacgggcgtgaattgtaaagattcctcagtggtcgcaccagcatcaatattactaaaaggaagtatttgcctgaattatataagataattattttttgagtgaaatccatacagggggcaaatcaaaaaaagtctatatttcactttgcccgcgccgcgaaagtcactgataatgcgccgcgttcatgtcctcaaaatggcgtaacgtcctatgctacatttgtttgctggcctggatttgcataccgggctgttattattgcttgcactggcttttgtgctgttctacgaagccatcaatggtttccatgacacagccaacgccgtggcaaccgttatctatacccgcgcgatgcgttctcagctcgccgtggttatggcggcggtattcaactttttgggtgttttgctgggtggtctgagtgttgcctatgccattgtgcatatgctgccgacggatctgctgcttaatatgggaagctctcatggccttgccatggtgttctctatgttgctggcggcgattatctggaacctgggtacctggtactttggtttacctgcatccagctctcatacgctgattggcgcgatcatcgggattggtttaaccaatgcgttgatgaccgggacgagtgtggtggatgcactcaatatcccgaaagtattaagtattttcggttctctgatcgtttcccctattgtcggcctggtgtttgctggcggtctgattttcttgctgcgtcgctactggagcggcaccaagaaacgcgcccgtatccacctgaccccagcggagcgtgaaaagaaagacggcaagaaaaagccgccgttctggacgcgtattgcgctgatcctttccgctatcggcgtggcgtttagccacggcgcgaacgatggtcagaaaggcattggtctggttatgttggtattgattggcgtcgcgccagcaggcttcgtggtgaacatgaatgccactggctacgaaatcacccgtacccgtgatgccatcaacaacgtcgaagcttactttgagcagcatcctgcgctgctcaaacaggctaccggtgctgatcagttagtaccggctccggaagctggcgcaacgcaacctgcggagttccactgccatccgagcaataccattaacgcgctcaaccgcctgaaaggtatgttgaccaccgatgtggaaagctacgacaagctgagccttgatcaacgtagccagatgcgccgcattatgctgtgcgtttctgacactatcgacaaagtggtgaagatgcctggcgtgagtgctgacgatcagcgcctgttgaagaaactgaagtccgacatgcttagcaccatcgagtatgcaccggtgtggatcatcatggcggtcgcgctggcgttaggtatcggtacgatgattggctggcgccgtgtggcaacgactatcggtgagaaaatcggtaagaaaggcatgacctacgctcaggggatgtctgcccagatgacggcggcagtgtctatcggcctggcgagttataccgggatgccggtttccactactcacgtactctcctcttctgtcgcggggacgatggtggtagatggtggcggcttacagcgtaaaaccgtgaccagcattctgatggcctgggtgtttacccttccggctgcggtactgctttccggcgggctgtactggctctccttgcagttcctgtaatcgtacgcaccaaaacgagcgggtcagctggcccgcttcagattgtgacatagtgcgctttgttcatgccggatgcggcgtgaacgccttatccggcctacaaaaacatgcaaattcaatagattgcagagattatgtaggcctgataagcgtagcgcatcaggcaattttgcgtttgtaatcagtctcgagcgggtcagtttactggcccgctttttttatgcgttattattgctgaagtgcttaatgccaaatcatcaatgcaatcaggctgaccaccaccagaccacacaatgcgctggtcagaataaactgccgacgcacccgctcacagcggcgaataaattcatcatcgtgatgatcgcgataacgttgggcatagatataccaaacgagacgcacctgtttgttgggttggccatgattggtaaaaaagccccctccatcaacatattgatagagcaatggatcgcagttacgcagtaccactaacaacgcgcgtagactactgaaatagcgcgccatgttaacaatgcaaacgacacataaagcccaaaataatgcgacggtgcttatcatacctcctccccggcgacctgcccgcggagttccaccccggggctaccgctcccgatacgctgccaatcagttaacaccaggtcctggagaaaccgcttttgtggtgaccaacatacgagcggctctatagatagtgtaggagatcaggttgttttttttccagaaggttaaccactatcaatatattcatgtcgaaaatttgtttatctaacgagtaagcaaggcggattgacggatcatccgggtcgctgtaaggtaaggatggtcttaacactgaatctttacggctgggttagccccgcgcacgtagttcgcaggacgcgggtgacgtaacggcacaagaaacgctagctggccagtcatcgacaactttatggaaggagtaacactatggcttataaacacattctcatcgcggtcgacctctccccggaaagcaaagttctggtagagaaagcagtctctatggctcgcccctacaatgcgaaagtttctctgatccacgtagatgtaaactactctgacctatacaccgggcttattgatgtgaatctgggtgatatgcagaaacgcatctctgaagagacacatcatgcactgaccgagctttccactaatgcaggctacccaatcactgaaaccctgagcggcagcggcgacctgggccaggttctggtcgatgcaatcaagaaatacgatatggatttggtggtttgtggtcaccaccaggacttctggagcaaactgatgtcttccgcacgtcagctgatcaacaccgttcacgttgatatgctgattgttccgctgcgcgacgaagaagaataatcttccctctacgacgtgttcctgaacgcccgcatatgcgggcgttttgctttttggcgcgccttgttacctgatcagcgtaaacaccttatctggcctacggtctgcgtacgcaatcaaaatccccagccaatacaacatttaacaccatcatattttccatcattagtgtgatcatctggttattttctgttgtaatagtgtattaatctattcaccgcatcaatattaagaatctctgacagatgtaaactttttcgcgcgttatcccttacgcgttcatacttttcaggatggtattggaaggttaataaatatgaatacaacaacacccatggggatgctgcagcaacctcgcccatttttcatgatcttttttgtcgagttatgggagcgattcggctactacggcgtgcagggcgtactggcggttttcttcgttaaacagcttggattcagccaagagcaggcttttgtcacttttggtgcttttgctgcgctggtctatggcctcatttccattggcggctatgtcggcgaccacctgctggggaccaaacgcaccattgttcttggagcacttgtgctggcgattggctacttcatgaccggcatgagcctacttaagcctgacctgattttcatcgccctggggactatcgctgtcggtaacggcctgtttaaagctaacccagccagcttgcttagcaagtgctatccgccgaaagatccgcggcttgatggcgcattcaccctgttctatatgagcatcaacatcggcagcttgatagcgttaagcctggcccctgtgatcgctgatagattcggttatagtgtcacctacaacctgtgcggggcggggttaattatcgcattactggtttacatcgcctgtcgtggaatggtgaaagacattggttctgaacccgacttccggccaatgagcttcagcaaactgttgtacgtgttacttggcagcgtggtgatgatcttcgtatgcgcatggctgatgcacaacgtagaagtcgccaatctggtgctgattgttctctccatcgtcgtcaccatcatcttctttcgtcaggcattcaagctggataaaaccgggcgcaataaaatgtttgtcgcctttgtcctgatgctcgaagcggtggtgttttacattctctacgcccagatgccaacaagcctgaacttctttgccatcaacaacgtgcatcatgaaattctcggtttttccatcaacccggtcagcttccaggcgcttaacccgttctgggtggtactcgccagcccaatactggcaggcatttacacgcatctgggtaacaaaggcaaagacctcagcatgccgatgaaatttactctcggcatgtttatgtgcagtctgggctttttgacggcggcagctgcgggaatgtggtttgcggatgcacaagggctgacaagcccatggtttatcgtgctggtgtacttattccagagcttaggtgaactgtttattagcgcccttggcctggcgatgattgctgccctggtgccgcagcatttgatgggctttattctcgggatgtggttcctgacgcaggctgccgcgttcttgctgggcggctatgtggcaacatttaccgcggtgccggacaacattaccgatccgcttgagacgttgcccgtctataccaacgtgtttggtaagattggtctggtcacgctgggcgttgcagtagtgatgctgttgatggtgccgtggctgaaacgcatgattgcgacgccggaaagccattaattattcttgcagaaagcagggtagcgttatcgctaccctgttttagttttacactggcgtacctgcatagatatcaaagcgatgccctttagtgactaccgcgtttggcgtggcgacattcgccagcggtggcgcgtagtccgggcgctttaccaccacgcgtttggtcgccagcaagcgtgcaggctccagtaatccatcggcatcaagatccggtcccaccaggctctgaaagacacgcatctcttttttcactagcgcgcttttctgcttatgcgggaacatcgggtcgagataaaccacctgcgggcgcggggtaatatcagtcagcgccgtcaggctggaggcgtgaattaactgcaaccgctcctgcaaccagccgccgatttccgcatccgcataaccacgcgccaggccgtcgtcgagtagcgcggcaaccactggattacgctccagcatccgcacgcggcagccgacactagccagtacaaaggcatcgcgcccaagtcctgcagtggcatccaccacatccggcaaataatcgcctttaatgcccaccgctttcgccaccgcctcaccgcgaccaccgccgaatttgcgtcggtgcgccatcgctccgccaacaaaatcaacaaagatgccgccaagttttggctcatcacgcttgcgcaattccagatgttccggcgttaacaccagcgccatcaggttgtcttcatcgtgctccagcccccagcgggccgccagaacagataaggcaccgtctccggtgcctgtttcatcaattaagcagattttcactgaatgatcagcccttaatgccgtaatgctccagcatcgcatccagctgcggttcacgaccacggaagcgtttgaacagatccatcggctcttcactaccgccacggctcagaatgttgtcgaggaagctctgcccggtttcacggttgaaaatgccctcttcctcaaagcggctgaaagcatctgccgccagtacgtcagcccacaggtagctgtagtaacctgcggcataaccaccggcgaaaatatggctgaaagcgtgcgggaaacggccccaggacggagatggcaccacggcaaccagtttcttgatttctgccagagtttcgaggatttttgccccctgatccgggcggaactcggcatgaaggcggaaatcaaacaggccgaactccagctgacgcagaataaacagcgccgcctggtagttcttcgccgccagcattttatccagcaactctttcggcagcggttcgccggtttcatagtgaccagagataaacgccagcgcctccggctcccagcaccagttttccataaactgactcggcagttcgaccgcatcccacggcacaccgctgataccggaaacaccagcggtttcgatgcgggtcagcatatggtgcaggccgtgaccgaactcgtggaagagggtgatcacttcgtcgtgagtgaacagcgccggtttaccatttaccgggcggttgaagttacaagtcaaatacgcgaccggtttttgcaaagaaccatcagctttacgcatctggcctacgcagtcatccatccacgccccgccgcgcttgttttcacgggcatacagatcgaggtagaagctaccgcgcagttcgttattttcgtcatacagttcgaagaaacgtacatccggatgccagacatcaacatctttacgctctttagcggtgatgccgtaaatacgcttaaccacttcaaacaggccgttaaccgctttgttttccgggaagtacggacgcagctgttcgtcactgatgctgtagaggtgctgtttttgtttttcgctgtagtaagcgatatcccacggctgcaactcatcgacgccaaattcggctttggcaaaggcacgcaattgcgccagctctttttcgccttgtggacgcgcgcgttttgccagatcggttaagaaatccagcacctgctgcgggttttctgccattttagtggcaagggatttaaaggcgtagttttcaaagcccagcagttgcgccagttcgtgacgcagcgcgaggatctcttccatcaccttgctgttatcccatttaccggcgtttgggccttgatcggaggcgcgggtgctgtaagcgcgatacatctcttcacgcagagcctggttgtcgcagtaggtcattaccggcaagtagcttgggatatccagcgtcagcaaataaccttccagctctttcgcttcggcctgggcttttgccgcagccagcgcgctttctggcatccccgccagctccgcttcgtcggtaacgagtttggtccagcccattgtcgcatcgaggacgttgttgctgtactggttgcccagttcagaaagacgggtcgcaatttcgccgtaacgctgctgtttctctttcggcagacctatgccagagagttcaaagtcgcgcagtgcgttatcaaccgctttcttctgcgccgtgttcagcgtggcgtaatgatcgccatcgcgcaggtcgcgatacgctttatacagcccttcatgttgccctacccaggtgctgtattcgctcagcagcggcagggtttgttcgtaggcttcacgcagttccgggctatttttcacgctgttcaggtggctgaccggggagaagatacgccccaacacatcgtccacttccgccagcggctggcagagattttcccaggtgtacggtgccccttgcgctactacgcgctccacgttttcgcggcagtcgttcaatgccttagtcacggctggaacgacatgttccgggagaattttagaaaacggaggcaattcaaagggagtcagtaacggattcgtcattcgcgcagtcctggttaaagaggttaaggaagcgctcaacaggcgctttacataatgtgtgtagcatggggttaagtgtagtgaatttcaatgagaaacgttacgctttcgcggcggcggcctcttttcggtatactgtcctgatacgcttttgtgcgccccgaatacgggccgatttttacttaccggaacacctttacccatgctcagttatcgccacagctttcacgctggcaaccacgccgacgtccttaaacataccgttcagagcctgatcatcgagagcctgaaagagaaagataaaccgtttctctatctcgacacccacgcaggggccgggcgttatcagttaggcagcgaacatgccgagcgtaccggcgaatatctcgaaggcatcgcccgtatctggcagcaggacgatttgcccgcagaactggaggcgtacatcaatgtggtaaaacacttcaaccgtagcggtcagttgcgttactaccccggtagcccgttgattgctcgcctgctactgcgtgaacaggacagcctgcaactgaccgaactgcacccgagcgattacccgttgttgcgttctgaatttcagaaagatagccgtgcgcgtgtcgaaaaagccgacggtttccagcagcttaaggccaaactgccgccggtttcccgccgtggtttaatccttatcgacccgccgtatgaaatgaaaactgactatcaagcggtggtcagcgggatagcagaaggttacaaacgtttcgccactggtatttacgcactgtggtatccggtggtgctgcgtcagcaaattaagcgcatgatccacgatctggaagcgaccggtattcgcaaaattctgcaaattgaactggcggtactgccagacagcgatcgccgtggcatgaccgcttccggcatgattgtgattaacccgccgtggaaactggaacaacagatgaataacgtgctgccgtggctgcacagcaaactggttccggcaggcaccgggcacgccaccgtaagctggatcgtgccggagtaattgcagccattgctggcacctattacgtctcgcgctacaatcgcggtaatcaacgataaggacactttgtcatgactaaacactatgattacatcgccatcggcggcggcagcggcggtatcgcctccatcaaccgcgcggctatgtacggccagaaatgtgcgctgattgaagccaaagagctgggcggcacctgcgtaaatgttggctgtgtgccgaaaaaagtgatgtggcacgcggcgcaaatccgtgaagcgatccatatgtacggcccggattatggttttgataccactatcaataaattcaactgggaaacgttgatcgccagccgtaccgcctatatcgaccgtattcatacttcctatgaaaacgtgctcggtaaaaataacgttgatgtaatcaaaggctttgcccgcttcgttgatgccaaaacgctggaggtaaacggcgaaaccatcacggccgatcatattctgatcgccacaggcggtcgtccgagccacccggatattccgggcgtggaatacggtattgattctgatggcttcttcgcccttcctgctttgccagagcgcgtggcggttgttggcgcgggttacatcgccgttgagctggcgggcgtgattaacggcctcggcgcgaaaacgcatctgtttgtgcgtaaacatgcgccgctgcgcagcttcgacccgatgatttccgaaacgctggtcgaagtgatgaacgccgaaggcccgcagctgcacaccaacgccatcccgaaagcggtagtgaaaaataccgatggtagcctgacgctggagctggaagatggtcgcagtgaaacggtggattgcctgatttgggcgattggtcgcgagcctgccaatgacaacatcaacctggaagccgctggcgttaaaactaacgaaaaaggctatatcgtcgtcgataaatatcaaaacaccaatattgaaggtatttacgcggtgggcgataacacgggtgcagtggagctgacaccggtggcagttgcagcgggtcgccgtctctctgaacgcctgtttaataacaagccggatgagcatctggattacagcaacattccgaccgtggtcttcagccatccgccgattggtactgttggtttaacggaaccgcaggcgcgcgagcagtatggcgacgatcaggtgaaagtgtataaatcctctttcaccgcgatgtataccgccgtcaccactcaccgccagccgtgccgcatgaagctggtgtgcgttggaagcgaagagaagattgtcggtattcacggcattggctttggtatggacgaaatgttgcagggcttcgcggtggcgctgaagatgggggcaaccaaaaaagacttcgacaataccgtcgccattcacccaacggcggcagaagagttcgtgacaatgcgttaaatgttaaagggctaagagtagtgtgctcttagcccttaattacgtttccgctatcagttcagaagctgaagcagaaagcggatcagttccagcagcgcaattaacgcccctagaacgatgattgctttatcaatcacccgttttctccatgcgatggagtgagaatgcatccgcttactcatccactgcctgtcacggcgcatgtctcattgttagataagaactctctcactccggccagagcatcagttaacggcaccacccgtacttctgaccaggactttgaaagcgtttatgcgcattgccagagtgaaaatgcctcagagctaactggataatcatacagtacatgcaggttataaaaccagcacgtccttgcaatagtttcagtatggtattagcattgatgcgttagatgatggctatctcactccagtcagagccaccaactcagggctggaaagtaaaaaaccgacgcaaagtcggtttttttacatccggattcggacaaggcttaatatgacgatgacccagtgaaagtatataaatcgtcactgcgatatataccgaagtgctccctccgccagctgaagaaatcgctaattcttgcaatgttagccactggctaatagtattgagctgttagataagaactctctcactccagccagagccaccaactcagggctggaaagtaaaaaaccgacgcaaagtcggtttttttacgtcctgattcagacctcctttcaaatgaatagccaactcaaaattcacacctattaccttcctctgcacttacacattcgttaagtcatatatgtttttgacttatccgcttcgaagagagacactacctgcaacaatcaggagcgcaatatgagttttctgttacccatccaattgttcaaaattcttgctgatgaaacccgtctgggcatcgttttactgctcagcgaactgggagagttatgcgtctgcgatctctgcactgctctcgaccagagccagcccaagatctcccgccacctggcattgctgcgtgaaagcgggctattgctggaccgcaagcaaggtaagtgggttcattaccgcttaagtccgcatattccagcatgggcggcgaaaattattgatgaggcctggcgatgtgaacaggaaaaggttcaggcgattgtccgcaacctggctcgacaaaactgttccggggacagtaagaacatttgcagttaaaaatttagctaaacacatatgaattttcagatgtgttttatccgggaggcattatgttactggcaggcgctatctttgtcctgaccatcgtattggttatctggcagccgaaaggtttaggcatcggctggagtgcaacgctcggcgcagtactggcgttagttacgggcgtggtccatccgggtgatattccggtggtgtggaatatcgtctggaacgcgacggctgcgtttatcgccgtcattatcatcagcctgctgctggatgagtccggcttttttgaatgggcggcgctgcacgtcagtcgctggggtaatggtcgtggtcgcttgctgtttacctggattgtcctgctcggtgctgccgttgccgccctgtttgccaatgatggcgcggcgcttattttgacaccgattgtcatcgccatgctgctggctttagggttcagtaaaggcactacgctggcgttcgtgatggcggccggattcattgccgataccgccagcctgccgcttattgtctccaacctggtgaatatcgtttccgctgatttctttggcctcggctttcgcgaatacgccagcgtgatggtgccggtggatatcgccgcgattgttgccacgctggtgatgttacatctctattttcgcaaagatattccgcagaactacgatatggcgctgctgaaatctcccgcagaagcgatcaaagatcctgctacgttcaaaactggctgggttgttttactgcttctgctggtgggatttttcgtcctggaaccgctcggcattccggtgagcgccattgcagctgtgggcgcgctgatattatttgtcgtcgctaaacgcggtcatgcgattaatacgggtaaagtcctgcgcggtgccccctggcagattgtcatcttcagcctcggcatgtatctggtggtttatggcctgcgcaatgccggattaacggaatatctttctggcgtactcaacgtgctggcggataacggcctgtgggccgcgacgctcggcaccggattcctcaccgccttcctctcttctattatgaacaatatgccgacggtactggttggcgcgttgtccattgatggcagcacggcatctggcgttatcaaagaagcgatggtttatgccaatgtgattggctgcgatttgggaccgaaaattaccccaattggtagcctggctacgctactctggctgcacgtacttagccagaagaatatgactatcagctggggatattacttccgtacagggattatcatgaccctgcctgtgctgtttgtgacgctggctgcgctggcgctacgtctctctttcactttgtaatgagatactgatatgagcaacattaccatttatcacaacccggcctgcggcacgagccgtaatacgctggagatgatccgcaacagcggcacagaaccgactattatccattatctggaaactccgccaacgcgcgatgaactggtcaaactcattgccgatatggggatttccgtacgcgcgctgctgcgtaaaaacgtcgaaccgtatgaggagctgggccttgcggaagataaatttactgacgatcggttaatcgactttatgcttcagcacccgattctgattaatcgcccgattgtggtgacgccgctgggaactcgcctgtgccgccctagtgaagtggtgctggaaattctgccagatgcgcaaaaaggcgcattctccaaggaagatggcgagaaagtggttgatgaagcgggtaagcgcctgaaataaagcggcgatatcccccccacaggttgttagaaaagtgcgctttatttatgtcggatgcgacgctggcgcgtcttatccgacctacaaagttatgaaaattcgatgaatagtatgttatttgtaggcctgacaggcgtagcgcatcaggcgattttgctatttacacagtactccctgcgtgagattccaattatcgcgtccagcatggtgtatcagtgagctgcttagttatcagcgatacagcgcagtagtttaaagacgtactggattatgatttatcagtggtttacacaacaaattattaaataattataagataccttaacccattttattattacacatctaaaacatcacaaaaaaaaatcacttcacacactatcagagaacataataactttttaaaatgagcgcattttgatagttgttaacgatttcctttacgatactatcactaccctttttttacacacaaatattaccgggtggagataaaagggaaatcaaaggtaattatatcaggaagatataacgcattacatttattgtgtgtagaagaaaatccattcctgttctaattatccaatttaaacatcttagcataaaacaaatgatgaataaggaattttatattgattattagcactttataatcattgaataaaaatagattttatgtacttttaaaacaatgcactatattatggggtgatggatattcatgtcacgccccaaaattaactgagttcacctaaacagaaaggatataaacatcagacaggtttacgttactatcaggcatatcacctcagaatcagatgaaaactataaagaaatatctattatggttttaatatttgttgataaggatagtaacatgaacatgacaaaaggtgcactcatcctcagccttagttttttgcttgccgcatgtagtagtattccgcaaaatatcaaaggcaataaccaacctgatattcaaaaaagttttgttgctgttcataaccagccggggttatatgttggtcaacaagcgcgctttggtgggaaggttatcaacgttatcaatggcaaaacggatacgttgttagaaatctctgtattaccgttggatagctatgcgaagcctgatattgaagccaactatcagggccgactgctcgccagacaaagcggcttccttgatccagtgaactatcgtaatcactttgttaccatcctcggcaccattcagggtgaacaacctggctttatcaataaagtcccgtataacttcctggaagtgaatatgcagggcatccaggtgtggcatttgagagaagtggttaataccacctataacctgtgggattacggctatggtgcattctggccggaaccgggctggggtgcgccttactacaccaatgcggtgagtcaggtaacacctgagctggtcaaataacaccaccgaaagatgcagatgctttctcagcatctgcatcatgcattacatcaaattaatacacagtaagctaactattattattataagccctgtcctgttaattacctttggcaaactgattataaagttaatgtccgcaccaggagtcggttatgtttcttataattaccagggatacgatgttcttcaccgcgatgaaaaacattctgagtaaaggtaatgtcgttcatatacagaacgaagaagagatcgacgtaatgttgcatcagaatgccttcgtcattattgatacattaatgaataatgtatttcattctaattttctcactcaaattgaacgattaaaacctgtccatgtcattattttctccccctttaatattaaacgctgcctggggaaagtgccggtgacctttgttccgcggactatcactatcattgattttgtcgcactcatcaatggcagttactgctctgtgcctgaagcggctgtgagtcttagccgcaagcaacatcaggttctgagctgcattgcgaatcaaatgacaacggaagatattctggagaaactgaaaataagcctaaaaacgttctactgccataaacacaatatcatgatgatcctcaatcttaagcggatcaatgagctggtacgccatcagcatattgattatctggtgtgaatttcaggcttacggtgagtctggctacgctgccacacagattagctaatactaacgcctttcacccctgccataccttttaataatcgcaacaggtcttctatgctcgttgtggcatgaagctggatatcaatggcgaccacttcatgatcttcattttcctgcaagctaactaaatcagtttttattttttgctgcttaaaccagtcgagcatacttaccgtattaccgttcactaatgtcagctgtaaatggtaatttttgttcatcaggcggaaggttaattgatggaagacttccagcaccaacaaggtcatcacactaccataaatacccagttcgtacataccgctgccaataaccatacctatggcggcggtcacccagatatccgctgccgtcgtcagacctacaatattttggttacgaacgagaatgttacctgcaccgataaacccgacgcccgtcaccacctgagcagcaatacggctggggtcgagtccgacgtgatctaaagacagcacgtcagcaaaaccatatttgctaacaatcataaacagggcgcttcccatgccaattaatacatgtgtgcgtaaccctgctcctttgccgcgcatttgcctttccatgccaatagcgccacaggcaattgccgcgagtataagacgtataataaattctgctgtcatataaaaatgcaaaaaggagcagcaagatggctcaacttgctactcttttttacttgcacctcattaattcggcaagtcattagatgcttgatttttgaaggtatacaaatttttctgcgggtttttcttacagtattcgatcactttaggaatttgagtgagatcggtttcatttaaagtaacggtatcgccacctttatatactgtttcttcatgcagcatccaccatgcaaccggggtcattgcttttggattcagatcaataaattcctggcaggtcatatctttagcggattcattggctgccaacgcagattgtgcgttcaccagactcaaagccgctacagcgcccataaaaataaacgctttacggagagaactaatattcattttgtaacccattcaatatagagattatatatgaacaggaggaatagctgcttttaaagaagatattccggcctgttcaatatgcaaggaagtacgatgtaacgcattcccggaattacatatctttcttaattttgtcccattcgcctttaactttatctttaaagttggcttgtttatcctgagtacaagcctgaacgatagctggggttacggttgcaataccctgaacatctaaaaccgcatcttctggtttatctttgttgttcagcgcttcagcaaaaccaactgcagttggctggaaggattcgtccacagccaggaaatcttcacaggtccaggagttgaccggttttttgttatcagctgctttttgcgcatccgctgcattgctcacaactggcagaagaagcagaccaccaagaataacgcctaatacttttttcatcgtaatatcctcaactataaagtgaaagagccgtcacgaatcaatttcgacactgaggttataacctggttttctgtatatgtcatgttgatggaaaatatcaaaatcagatatttttatttcaatacaatgagttacagatgcatcagatactgcaattaggaaatttttattaaatcgactgcattcttagacgcgtttttggcatagattgatagcaggggattttcttcttaattttatagggtggttctatgttatatatagataaggcaacaattttgaagtttgatctggagatgcttaaaaaacatcgcagagcaatccagtttattgccgtgctgctgtttatcgtcgggttgctgtgtatcagtttcccgttcgtctctggcgatattttaagcacagtagtgggtgcattattaatctgcagcggtattgcgcttattgtcgggttattcagcaaccgcagtcataatttctggccggtattatccggtttcctcgtcgcagtcgcctatttattgatcggctatttcttcatccgcgcaccggagctgggcatttttgccattgcggcatttattgccggtttgttctgtgttgcaggggttattcgcctgatgagttggtatcgtcagcgtagtatgaaaggcagctggctacagctcgttattggtgtgctggatatcgtcattgcctggatattccttggtgcaacgccgatggtgtctgtaacgctggtttccacactggtgggaattgaactgatatttagcgccgccagcctgttcagcttcgccagtttgttcgttaagcagcaataattaccccggttgtcacccggatcatagtcacttgatgtgactatgatccgattaatactctctccgctacgcagtgttgtagatcaattgcgcactatcattgaaataattacctgctagtgattatttcaacctactgaatttcatctaatttttttcactctatggcaaattagccatttcaaacattatcatggctgatattttccgtagtcaggtttaatgttttaaaagtgctgtgggaaagtgaacaaagagttccgtaagcgttgatgctatgggcggttaaataagtaatccgggttcatttttttgcaactggcgttgattacattgcataaatatccgtgtctccagacgctatataaaaacctgaagacatgaatgcgttatttactcaggtaatttcaatgcgttaaaagaaagctggcaatccaattgccagcttaagtcgaaacaaggagactcgatatttaaatcggattacattttaactttagtaatattcttcagagatcacaaactggttattgataacttattcttgggcagtaatccgcaaacgttaactttttgtttgctatttacaagctgataacaaccaggaatcttacttaggatcaatatatggagtgcgtgatggataaatctgaagtattgattagtgttaatagacgtattagttcacgaagggtaaagttcttataggcgtttactatattgaacaacgattcggacaaggatgtaaataatgaaaaggatgacatattcgaaacgataacggctaaggagcaagttatgatttttctcatgacgaaagattcttttcttttacagggcttttggcagttgaaagataatcacgaaatgataaaaatcaattccctgagtgagatcaaaaaagtaggcaataaacccttcaaggttatcattgatacctatcacaatcatatccttgatgaagaagcgattaaatttctggagaaattagatgccgagagaattattgttttggcaccttatcacatcagtaaactaaaagctaaagcgcctatttattttgttagccgcaaagaaagtatcaaaaatcttcttgagattacttatggtaaacacttgccccataagaatagtcaattatgttttagtcataatcagttcaaaattatgcaactgattctgaaaaataaaaatgaaagcaatatcacgagcacgctcaatattagccaacaaacattaaagattcagaaattcaacattatgtacaagctgaaactaagacgtatgagcgacatcgtcaccctgggtatcacatcttatttttaatcaggacataagcaactgaaattgatggctggcatgacgagggatgcagatgctgatttcattacccccggtgattactaaaggagaggctaaaacgactttattcccctggtatgtgtatccaccagtagaacccttcgttgcccgaatgctggcaggaactgttggcagaacggcaacattttttttgtcgttgacctcaccatgtcgatcactgtgcctgtatcccaccttactggctgacaaccccactatgccgctggtctgtaaatccctcatatctctcctcgcgcgcaatttaaagaaccgttatttctcaagaattttcagggactaaaatgaacagaagaagaaagctgttaataccgttgttattctgcggcgcgatgctcaccgcctgcgatgacaaaagcgcggaaaacgccgccgccatgacgcctgaggtcggtgtcgtcacactctcccccggtagcgtcaatgtgttgagcgaattgcccggtagaaccgttccttatgaagttgccgagatacgtccccaggtgggcggtattatcattaaacgcaactttatcgaaggcgataaagtgaaccagggcgatagcctgtatcagattgatcctgcacctttacaggccgagctaaactccgccaaaggcagcctggcgaaagcgctctctaccgccagcaatgcccgcatcacctttaaccgccaggcaagcttgctgaagaccaactacgttagccgtcaggattacgacaccgcgcgcacccagttgaatgaagcagaagccaatgtcaccgtcgccaaagcggctgttgaacaggcgacgatcaatctgcaatacgcgaatgtcaccagcccgattacgggcgtcagcgggaaaagcagcgtgaccgtcggcgcactcgttaccgctaatcaggcagatagcctggttaccgtacaacgtctggacccgatttatgtcgatctcacgcagagcgtgcaagatttcttacgcatgaaagaagaggtcgccagtgggcaaatcaaacaggttcagggcagtacgccagtacagctcaatctggaaaatggtaaacgctacagccagaccggcacgctgaaattctccgacccgacagtggatgaaaccacgggctccgtgacgttacgggcgattttccccaacccaaatggtgacttgctgcctggcatgtacgtcacggcattagtggatgaaggtagccgccagaatgtattactggtgccgcaggaaggcgtcacccacaacgcccagggtaaagcaacggcgctcattctggataaagacgatgtcgtgcagctacgcgaaattgaagccagcaaagccatcggcgaccagtgggtcgtcacctctggcttgcaggctggcgatcgggtgatcgtttccggtttgcaacgcattcgtccgggtatcaaagcacgagcaatttcctccagccaggaaaacgccagcaccgaaagcaaacaataacgttgcaggcttaaggggactttcatggctaactattttattgatcgcccggtttttgcctgggtacttgccattattatgatgcttgcaggtggtctggcgatcatgaacttaccggttgcgcagtatccgcagattgcgccaccgaccattaccgtcagcgctacctatccaggtgccgatgcgcaaacggtagaagacagcgtcactcaggtgattgagcaaaatatgaatgggcttgatggcctgatgtacatgtctagtaccagtgatgcggcgggcaatgcctctatcactctgaccttcgagactgggacatctcctgatatcgcacaggttcaagtgcaaaataaactgcaactcgctatgcctagtttacctgaagcagtgcagcagcaggggattagcgtcgataagagcagcagtaatatcctgatggtagcggcgtttatttctgataacggcagcctcaaccagtacgatatcgcggactatgtagcgtctaatatcaaagacccgctaagccgtaccgcgggcgttggtagcgtacaactctttggttccgagtatgccatgcgtatctggctggacccgcaaaaactcaataaatataacctggtaccttccgatgttatttcccagattaaggtgcaaaacaaccagatttccggtggtcaactgggtggcatgccacaggcggcagaccagcagctaaacgccagcatcattgtgcagacgcgtctgcaaacgccggaagaatttggcaaaatcctgttgaaagttcagcaagatggtagccaagtgctgctgcgtgatgtcgctcgcgtcgaacttggggcggaagattattccaccgtggcacgctataacggcaaacctgctgccgggatcgccatcaaactggctgccggagcaaacgccctggataccagccgggcagtcaaagaggaactgaaccgcttaagtgcctatttcccggcaagtctgaagacggtttatccttacgacaccacgccgtttatcgaaatttctattcaggaagttttcaaaacactggttgaggctatcatcctagtcttcctggtcatgtatctgtttttgcagaatttccgtgccacaatcatcccgacgattgccgtaccggtggttattctcgggacgtttgcgatcttgagcgcggtcggtttcaccatcaacacgttgactatgttcgggatggtgctggcgatagggttactggtggatgacgccatcgtggtggtggagaacgtcgagcgtgtcattgcggaagataagctaccgccgaaggaagcgacgcataaaagcatggggcagatccaacgtgcgctggtcggtattgccgttgttctttccgcagtgtttatgccgatggcctttatgagcggtgcaaccggggagatctaccgccagttctccatcacgctgatctcctccatgctgcttagtgtatttgtggcaatgagcctgacccctgccctgtgcgccaccattctgaaagccgcgccggaaggcggtcacaaacctaacgccctgttcgcacgcttcaacacgctgtttgaaaaaagtactcaacactataccgatagcacccgcagcctgttgcgttgtaccggtcgctacatggtggtctacctgctgatttgcgccgggatggcggtgctgttcctgcgcacgccgacctctttcttaccagaagaggatcagggggtatttatgaccaccgcgcagttaccttccggtgccaccatggttaacaccacgaaagtgctgcaacaggtgacggattattatctgactaaagagaaagataatgtccagagcgtgtttaccgttggcggctttggcttcagcggtcaggggcaaaacaacggcctggcgtttatcagtctcaagccgtggtctgaacgtgtcggtgaggaaaacagcgttaccgcgatcattcagcgggcaatgattgcgttaagcagtatcaataaagccgtcgtcttcccgttcaacttacccgcggtggctgaactgggtaccgcgagtggttttgatatggaactgctggacaacggtaacctggggcacgaaaaactaacccaggcgcgaaacgagctgttaagtctggcagcgcaaagtccgaatcaggtcaccggggtacgcccgaacggcctggaagatacgccgatgttcaaagtgaacgtcaacgctgcgaaagctgaagcgatgggcgtggcgctgtctgatatcaaccagacaatttccaccgccttcggcagcagctacgtgaacgacttcctcaaccaggggcgggtgaaaaaagtgtatgtccaggcaggcacgccgttccgtatgttgccggataacatcaaccaatggtatgtacgcaacgcctctggcacgatggcaccgctttctgcctacagctctaccgaatggacctatggtagtccgcgactggaacgctacaacggcatcccgagtatggagattttaggtgaagcggcggccgggaaaagtaccggtgacgccatgaaatttatggcagacctggtcgctaaacttccggcaggcgtcggctacagttggaccggactaagctatcaggaagcgttatccagtaatcaggctcctgcgctgtatgcgattagtctggtcgtggtgttcctcgccctcgccgcactctatgagagctggagtattccgttcagcgtgatgttggttgttccgttaggcgtcgttggcgcattactggccaccgatctgcgcggcttaagtaatgacgtctacttccaggttggtttgctgaccaccatcgggctttccgccaaaaacgccatcctgattgtcgaatttgccgttgagatgatgcagaaagaagggaaaacgccgatagaggcaatcatcgaagcggcgcggatgcgtttacgcccaatcctgatgacctctctggcctttattctcggcgtgctgccgctggttatcagtcatggtgccggttctggcgcgcaaaacgcggtaggtaccggcgtgatgggcgggatgtttgccgcaacagtgctggcaatttacttcgttccggtctttttcgttgtagtggaacatctctttgcccgctttaaaaaagcgtaacgtgtaaatgagagtaaggttgaacatgaaggttcagccttactctttcctgctaaccattcaccactcaacaaccagctaaccgtcaggaataccaggcttagtacacagcactgaaagtagaaaccactccagccattcgtcatcaatttgaacaacacaatactgacccacattcccgtaatcgtatgaattgtcagcttaataatcccaaacatgccgagtcttttcctcctgaaaataccgataccgcctggcaaactgcgaaagagaactagccggtagcccggcagaaatcatcagggaagagtttcacatgaagcaggtgtgagatcctgaccaatattcaaatgcgaaatatgtcaggaaaaggtacctgggctatgttgcgcaaactgatgtggcgttacaccataatattgtcgaaatgtgtttataaagtagcttgtactgctatagccacatttttccgcaatagtatgcagaggaatttgacgtaactcgagtaatcgtctggccatgctcatcctggaggcgagtaatattttactgaaacaggtattttcatcctgcaacttttttttgattagactctcgctggtatacattctttccgcgatatcgcgcagataccaacgtttggcgatatcaaagctaataaggcgttcaacttttccactaacagtgctgatgctattgaaaagtaaggggatcagttctttcttatgagaaaacatgcttaaacaggaaaggtagagcatattgctcagtatcggactatttaccccggattcattgaagctatcaaaaatcgccgtcaccagcggcatggggggactctggttaattaacaaacggtctttgctgtgtaaccctaaattgcgtggtagctgacgaatattttgtaagtaatggcaaactgtcagctcatcgatatccagtcgtcgcgtatccggactacaaaacgcaaaatcgtctgccaaatttttctccagcagcagaatactctcgttatgcaggcttattttttgctgttcatgataaatatcgaaactacgacgaatgaggatcacgctgcagacatgagtcatgattatcccttatatttcatactgcgattatttcaatttcagtatactaatgaaatgatgccagactgtttcttagcgcaaaaactgccagatttggtaggaccaaaatttatccacaaagtagttttgcataacagttaattgataataagtaaatgcagcacgaatatattttcgcacagcgtatagcttatgtttataaaaaaatggctgatcttatttccagtaaaagttatatttaacttactgagagcacaaagtttcccgtgccaacagggagtgttataacggtttattagtctggagacggcagactatcctcttcccggtcccctatgccgggttttttttatgtctgagtaaaactttataatcttattccttccgcagaacggtcagtgccgtaaaaattcccttgcgcaacaatacttgccgcgctgtcacggttgctcaatctctgcgcgcttcgctcctgatactctgtgggcgtcatcccataataatttcgaaagacgtaaatgaaatagctcacgctgtgatatccacaggatactgcaactcgcttaatactaaaaccatgtataacaataagttgcaaagcacgttgcattctacactcagtaagcaactgactataacttgtctcttcttcgcgcaattttttctttaacagacttggactcatcaacagctcgctggcgattcgggctagtgtccactcatgggcgatattattattgataaccgtacaaactcgtgttcgcatgttcggttgtaaaacgttcagaagcagcggtataaagtgctcatcctcaagaaaaacagataacaacgcaaagattaatgctcttttacgtagcatttctgcatagcgaagattcttattctggcttagttgcgcaacttcctgaaaaacaggaatatctctactacagtgatgaacgagtaaactagaaacttttttatgtgcatgaagatttaatgcctcctccttgagcatcgggagaaataaactaagcgtgtccctactcacgaatacaaaattttcaacacacttatctactcgaatttggcttgcatccgcaaaaaccaggtcaccgccattaaaatagcgatattcaccattaaccatggtgagaatatatttatgtcttgcatacgcaattagacaattcccatgtagactttgcatagttgacttaatattacataaacatattactgtttattaatgtagcacgccgccctcttaagtcaaattgattgataaataaatttaaacgaagcgggagaacaggatgataatgtgtgatgttctacgggcaggatgactggatttataatacaaaaacgtgtttaagaacacagggaaattaatagtaagcaaataatcccttttcgtgacattaaaggtaatcgctacatttaataaacattcatataacatatatcttatcaacacgatgaatagacagccaatatattattgcgattaataagcaaccgaatgcccagctgtttttttaaaggctgggcattcggtttttacaacgttatgttatcaggtgtgtttaaagctgttctgctgggcaataccctgcagtttcgggtgatcgctgagatatttcagggaggctttgtagtcttccagcaacagttcagcaaagtccatttcgaagccgcgacgacacataatgcgcatcaccacgatgtcggtggcttcaccgccgagagtgaaggccggaacctgccagccgcgcagacgcagacgttcagagaggtcgtacagggtgtatcccggatcttcaccatctttcagtttgaagcaaaccgccgggatgccttcgtccgggcgacccgtacagatgaactcatacggccccagtttggcgatttcatccgccagataagcggcaacctggtaagaggcgttctgtactttggtatagccttcacgaccgaggcgcaggaattcatagtactgtgcaattacctgacccgccgggcgggagaagttgatggcaaaagtaccaatttgaccacccaggtagtcaacgttgaacaccagttcctgcggcagcgcttcttcgtcacgccagataacccagccgcagcccagcggagccagaccgaatttatggccactagcactgatgcttttcacacgcggcaggcggaagtcccagacgatatccggggcgacgaacggtgccaggaagccaccgctggcagcgtcgatgtgcatgtcgatgtcgataccggtgtcggcctggaatttatccagcgcatcgtgcagcggttgtgggaactcatagttaccggtgtaggtcacgccgaaagtcggcaccacgccgatggtgttttcgtcacaggcttcaatcatgcgtttcgggtccataaacaactgaccggggcgcatagggatctcacgcagctccacatcccagtagcgggcgaatttatgccagcagatttgtaccggaccgcacaccaggtttggtttatccgttggtttgcctgcagcttccatacgcttgcgccaacgccatttcatcgccatcccgccgagcatacaggcctcggaagaaccaatggtgttggtgccaacggcctgaccatttttcggcgcaggcgcatgccacagatcggcaaccatatttacgcaacgcaggtcgatggctgcggattgcggatattcttctttgtcgatccagtttttattgatgctcaaatccatcaatttatggacgttttcgtcgtcccaggtctggcagaaagtggccaggttctgacgagcgttgccatcaagatataattcatcattgataatctgaaatgcgacatcatcgcgcatttcgtgcagcggaaatcgtttactctccgcgatagtagaaatggcctttgcgccaaaacgactatcgagtagttcactgcggaaatccgttaacagcttctggtccatttcgaactccttaaatttatttgaaggcaataaaaaagtaggatttatccgcaatggaagcaaggcattacaggcttaatttaaataacaaaatcctaagcagaaaaacgactttttataatataaacatttaacatgataatattaaaaacagactttattatcgtaataaaaatcgcccaaacattgctgttcgggcgatcaaattaattattgtttatcctgcatatacggcgtgtacaccccgttcagactgtgcaggaaagctacgatatcatccacatcctcctgcggcagctctttgcctacctgatagcgcagcatcagtttcaccgccccgtccagcgtcggcacgtcaccgcgatggaagtacggtgccgttaaagcaacgttacgtaaaccgggtactttctgacgcaatttatcacgctcttctttagtcacattcatacgaccaatatccgccgccgtaatttccccaaagttaaagtcttttttcagccccaacggttcaaaggaacgtccgccgagaataataccaccatgacaagttgcacatttattatctttaaataattgatagccttttttctgttgcgccgtcagcgcattttcatctccgcgcaaccatttatcaaatggggaatccggcgtaattaatgttttctcaaattcagcaatggcatcagtaatattttcgccactgaaaccttgcggatagacttcgaggaactgcgttttaagctgcggatctttttccagcttagcaataatttcgtcccaggatttgctcgccatttcaatcgggttcaacggcggtccaccagcctgatcctgcaatgttgccgcacgaccatcccagaactgctcaacgttaaatacactgttaaataccgtcggcgcgttaatcggcccaactgcgccaccaacaccaatgcttgtttttctgccatcgacgccccccgcattcaacgcatggcaatgagcgcaactaatggtgctatcagcgcttaaacggggatcgtgatacagcgcaaaacccaacgccactttttgcgcatcggtaggcagtttttgcgggatgggctgcaccggttcattgcgatgttccggagcagtatcattgctggcgtaatattccgcgcgctgttttgcaatccaggccagtatttccgcccgctcttcatcactcaccttacccgcccagtgtagcgcggtataacgcgttggtggcatagtttcatactgcatcacccattcaatcttattcaaatcgctttggctaacgggtttatcagccagcagtgccgcacgcacggcctcaaggttaaaagatttatatccaagcttaatgtcgtaatccatcaactgtttcgcgccaggaatataataataggcgggtaattctgcgctaggcgtgtggcaatagtcgcatcctttttcgcggagaaagcctaaaaccttattattttcactgacagcagatgcctgaacatcggcctgtttactgcgtttattatcgtggtaccacacataaccagataaccctaaatagcaaatcgcgacgccagccaggccgatcgcggtaatacgactgaccattttcattattcttccctcacggtggtgagttattgtgacccagaaaattttccagaatgctgcaaacgtctctgcgagacaaagccatcataaaaaacagggagatacgctttttgataggaatcaatcaattacatgaatataaactatcaataagatagcctgtgcctattacccagatcaggaatggcatatcatgattgcggcgagagcaggattgaatgttctgaaaatgaaaaacaacaccaaatcggtatttttataaattccattgatattagtgcgttatattttttgacaggttaataaacgtgatccaccgcacgctttgtcgcccaccaggcggagcgaatgactacccttaaagaaaagccgataattagcgacgaatttcggaggttggatccttatgctcaatcagaaaattcaaaaccctaatccagacgaactgatgatcgaagtcgatctctgctatgagctggacccgtatgaattaaaactggatgagatgatcgaggcagaaccggaacccgagatgattgaagggctgcctgcctctgatgcgctgacgcctgccgatcgctatctcgaactgttcgagcatgttcagagcgcgaaaattttccccgacagtaaaacctttcccgactgcgcacctaaaatggacccgctggatatcttaatccgctaccgtaaagtgcgccgtcatcgtgattttgacttgcgcaagtttgttgaaaaccacttctggctgccggaggtctactccagcgagtatgtaagcgacccgcaaaattccctgaaagagcatatcgaccagctgtggccggtgctaacccgcgaaccacaggatcacattccgtggtcttctctgctggcgctgccgcagagttatattgtcccgggcggccgttttagcgaaacctactattgggattcctatttcaccatgctggggctggcggaaagtggtcgggaagatttgctgaaatgcatggccgataacttcgcctggatgatcgaaaactacggtcacatccccaacggcaaccgcacctattatttgagccgcagccaaccaccggtttttgcgctgatggtggagttgtttgaagaagatggtgtacgcggtgcgcgccgctatctcgaccaccttaaaatggaatatgccttctggatggacggtgcagaaagcttaatccctaatcaggcctatcgccatgttgtgcggatgccggacggaagcctgctcaaccgttactgggacgatcgcgacacgccgcgtgacgaatcctggcttgaggacgttgaaaccgcgaaacattctggtcgcccgcccaacgaggtgtaccgcgatttacgcgcgggggcggcctccggttgggattactcttcccgttggctgcgtgatactggtcgtctggcgagcattcgtaccacccagttcatccccatcgatctgaatgccttcctgtttaaactggagagcgccatcgccaacatcagcgcgctgaaaggcgagaaagagacagaagcactgttccgccagaaagccagtgcccgtcgcgatgcggtaaaccgttacctctgggatgatgaaaacggcatctaccgcgattacgactggcgacgcgaacaactggcgctgttttccgctgccgccattgtgccactctatgtcggtatggcgaaccatgaacaggccgatcgtctggcaaacgccgtgcgcagtcggttactgacacctggcgggattctggcaagcgagtacgaaaccggtgaacagtgggataaacccaacggctgggcaccgttacaatggatggcgattcagggatttaaaatgtacggcgatgaccttctgggtgatgaaatcgcgcgaagctggctgaagacggtgaatcagttctatctggaacagcacaaactgatcgaaaaataccatattgccgatggtgttccccgcgaaggcggcggtggcgagtatccgttgcaggatgggtttggctggactaacggtgtggtacgccgtttaattggtttgtacggcgaaccataatatttttacagccagccgctaacttcctgctggctgtaaaattatcctcttcaggaggagatatttaacatcattgccgcctgggtgcgatttttcacttccagacggcgatacagggattccagatgcgcttttaccgttccggtactgatattcagcgctctgccgatctccttattactttcgcccgccgctaacatggttaaaatctcccgctggcgggcgcttaagcttttgagatctttaatgtccttttccggcgtcgtccgccagtctccaggcagaaacatcatccccatcgccgcactatttaccgccaacgcaaatgtctcgacggtactatcacgaggcacaatggccagcacattaaaatggataacttcctgtaaccaccgtttattgcaatccgtcgccgtaattaacaccttaacctcaggaaattgcaccacggttttttgcagcaaccagtagcaaaactcaccatcctgatcgccatcgagcataactaaggcttcagggtaactttccagcttttgccataactcgtctgcctgactggccccctgaatactcactcctggaatacgctgctgtaaactgattttcattccatgaataaatatactctgcctgtcaaacatgactatttgcataactgaatctccacctgaatacgttaaaaagacttaagtagtggaagggtattacccgcgagaaaaaataagaattcgccatttggcggtggccattctacagagatgacgtgtagaaaatagttaccgatataaatagttacagctaaacgcctgaaattacatgtcgagggcactatttaaaacaattttgaggatttccttatattggtggttagtacgcatgcaattaaaaatgaaattccgcgaccacaagccaaaataacaaacggcaaggagacaaaaataagcacaaatagccaacacgtcctctgttcactttaaagggaatcgctgaaaaatacgctctgtttaaggggattcacctttctcagaaagctattccgcccttttcctgctgagaaatcgccacattcggcatgacaacattgtgaaacccggcattagatgttagaaaaaacaataaacaatgcgatatgcgcgttactgtttcgctgtgaacaacaaagcgtcaaagaaatggataaaattcacgcaatgcagttgttcatcaaagtcgcggagctggaaagtttttcccgcgcagcggatttctttgctttgccaaagggaagtgttagccgccagatacaggcactggaacatcaacttggcacccagcttctccagcgcaccacgcgacgggtcaaactcacgccagaaggcatgacctattatcaacgagcaaaagatgtgttgagtaatctcagcgaactggacggtctgtttcaacaggatgccaccagtatcagcggtaaattacgcatcgacatcccgccaggaatcgcgaaaagcctgttactgccgcgcctgagcgaatttctctatctgcatccgggaattgagctggaactgagtagccatgaccgtccggtagatattcttcatgatggttttgattgcgtgatacgcactggcgcgttaccggaagatggcgttatcgcccgtcccctcggcaaactgaccatggtcaactgtgccagtccgcactatctgacgcgctttggttatccgcaaagccccgatgatctgactagtcacgcaatagtgcgttatacaccgcacctgggtgtacatccgttaggttttgaggttgccagcgttaatggcgtccagtggtttaagtctggcggcatgttgacggtaaacagtagcgaaaactatctcaccgccggtcttgccggtctggggattattcagatcccgcgcattgccgtgcgcgaagccctgcgtgccgggcggcttattgaagtattacctggctaccgtgccgagccgctctcccttagcctggtttatccgcagcgtcgggagctttcccggcgtgtaaacctgtttatgcagtggctggctggcgtaatgaaagagtacctggactgaccgactatactttttaagaatgaccacgacagaaggacaaaagagcggatgacgcaggaaaacgagatcaagcgtcccatccaggatctggagcacgagccgattaagccgttggataatagcgagaaaggcagcaaagttagccaggcgctggaaaccgtcaccaccactgccgaaaaagtccaacgccaaccggttattgcgcacctgattcgcgcgacagaacgctttaacgatcggctgggtaaccagtttggtgcggctatcacctatttcagttttttgagcatgataccaattttgatggtgagctttgccgcagggggctttgtgctggcctcccatccgatgttgctacaggatatcttcgacaaaattctgcaaaacatcagcgatccgacgctagccgccacgttgaaaaacaccatcaacaccgccgttcagcagcgtacgactgtagggcttgtcggcctggcggtggcactttattccggcatcaactggatgggtaacctgcgtgaagcgattcgtgcccagagccgcgatgtctgggaacgcagcccgcaagatcaggagaagttctgggtaaaatatctgcgagattttattagcctgattggtttgttgattgcgctgattgtgacgcttagcatcaccagcgttgccggtagcgcgcagcaaatgattattagcgccctgcacctgaacagcattgagtggctgaaaccgacgtggcgattgattggcctggcgatttccatcttcgccaactatctgcttttcttctggatcttctggcggttgccgcgccaccgtccgcgcaaaaaagccctgattcgcggaacatttctggctgctattggttttgaagtgattaaaatcgtgatgacctacaccctgccaagcttgatgaaatccccctctggcgcagcatttggttccgtgctggggctgatggcatttttctacttcttcgcccgtttgacgctgttttgcgcggcgtggattgccaccgccgaatataaagacgacccgcgaatgccggggaaaacgcagccttaaaataggccggatgcggcgtaaacgccttatccggcatacgattttattcggcctggctccccgtaggccggataagatgcgccagcatcgcatccggctataatgcgcacataacctcttgaaactcgtccccagagcctcttcagccatctatttgggagcaaacaatttcattccaactcataaccccagcatataaatccagttggtaacttttatttaacctgaaaccagttttatccactatttataaaattatgtgaagcatttcatagaagaaaaatcactggcctaaacattatcccctttttgcctgatttttgaccatttccgcgatttgttacacattgaaatatcacttttgctgtgcgtaatatggctattcgttagccaaaaaataagaaaagattatgcaagcaacagccacaacactcgaccacgagcaagaatacacgccgatcaacagccgtaataaagtccttgtcgcctctctcattggcacagccattgagttcttcgacttttacatttacgccactgcggccgttattgtgtttccgcatatcttcttcccgcagggcgatcctacggcagcaacgctacagagcctcgccaccttcgccatcgccttcgtcgcgcgccccattggctctgccgtttttggtcattttggcgatcgcgttgggcgtaaagcgacgctggtcgccagcttgctaacgatggggattagcaccgtggtgattggtctgctgccgggctatgccacgattggtattttcgccccgctgctgctggcgctggctcgatttggtcagggtctgggcttaggcggtgaatggggcggcgcggcgctgctggcgactgaaaacgccccaccgcgcaaacgtgcactgtatggctcctttccgcagctgggcgcaccgattggcttcttctttgccaatggcactttcttgctgctttcctggctactgaccgacgagcagtttatgagctggggctggcgtgtgccatttatcttcagcgcggtgctggtcattatcggcctgtatgttcgcgtgagcctgcatgagagcccggtgtttgagaaagtcgctaaagcgaaaaaacaggtgaagatcccgctgggtacgctgctgaccaaacatgttcgcgtaaccgtactgggtacgttcattatgctggcaacctatacgctgttttacatcatgacggtctactctatgacctttagtaccgccgccgcgccagttgggcttggcctgccgcgtaacgaagtgttgtggatgttgatgatggcagttattggttttggcgtgatggtgccagtcgctggattactggctgatgcctttggtcgccgtaaaagcatggtaatcatcaccacgctgatcatcctgttcgcgctgttcgcctttaacccactgctcggttctggcaacccgattctggtttttgccttcctgctgctggggttaagtctgatgggtctgaccttcgggccaatgggtgcgctgttaccagagctgtttccgacagaagtgcgttacaccggagcaagcttctcttacaacgtagcgagcattctcggggcttccgttgcgccatatatcgcagcctggttgcagactaactacgggctaggtgcggtggggttatatctggcggcgatggctggcttgacgttaatcgccctgctgctgacccatgagacgcgacatcagagcttgtaataagagtgaaaagcctgatgcgctacgcttatcaggcctgaatttccatacaatatattgaattcgcaaggatttgtaggccggataaggcgttcacgccgcatccggcatgaacaaagcacactttgccaacaatctaaatctgtttaattgccggatgtcagacatccggcaattatcatcacttcttcatctggctcaaaatcgtccgacactgattagcctccccttcggaaggactgatcagtgccagtaacgccgccgccggtgttaccagcgttgccagtgccgcagcaacagcaccacgggcaatcagcggtccggctttcaccccagcctgcggatttttaaacgtcccccgcacatacagcgggctacgcagtgtgataatccgaattcctttactctccggatcaatagtcaaatccagctgttcgctagcaaaacttgccgtgccggtaacattaatcaacgcgttctcagtatcgaaagcaaaaatctgcgggcgcgccacgccgttggcaatattcagattcgccgccgcgcagttcacccgcacctcatcatcaccaaatatcgcaccgacaatgtagttgccgacattcagcccaacaatctccatcaggttgcggctcaccagcccgtcattcatcaacagtttcaggttgccgttactgttgcctaaaagtgccgccacgctgttaccgctaccgcgtagttccgcgtcaccgttcatttcccccagcgtcttctgcatcagttccacatcgggcatcagttctttcagtttcagtcgacgagcctgaatatctgcccgcccctgcatcggctttttatcgccttccagatgaatattcgccgcaatgctgccgcccgccatgccaaatttcagcggttgcaggcgcaggtcagcatttttgaggatgatatgagtagaaagatcgctaatcggcaggctactgccatgctcaatgcgccgccctttgaagcgaacatcggcatccataacgtcccatttatcggtttcgaagcggtcataaggcagcactttgcccgcaggctgaacgcttttttcgcccttcttctgttcagaccgtttgctcttttctgcccctttcccggaatcaacgccaatcaacggtcccaggtccgccagccgcaattgccggctctcgacatcaccttccagttttggtcgtggctttccggtggtgtagaccagagaaccgtggatatcgctatcaccaattcgcccattaaaaccgcgataatcaaagacgctgcttttttcagtgtcgattttcgctaccagccgaccatccgtttcaaacggcggggtatcgggcagcagaacgcccgtcagttcatagagatcacccagactatcgccagaaaatttaagccgtaaatcgacaccgcccatcttcattgggtcattcacgacgccatcaaaagcaacacgggtgttaccagagcggaaatcagcctgtaccggaaacggcgtcccttcgccacgcagcgccagcataccgcctatttttcccgtacccgtgagcggttcaccgttatatcgtccctgcgccttcaggccaaaaacgtaatcgcccaccttttctttatccgctttacctttgcttccagtaacttcgctgaacggcagcggcttgcctaagggatcaacaaaaatctccagatccgctttgcttactttgtcatcaatggcgatccgcccttgatcgaaaagaatattatccagccgaaagctccatgcgctcggctttgcattcgcgtctttgttatcatcgttggcaagattaaacgtccagttattgttcttttcagagaggcgaatcaggcgcgcgtcgggcttttcgagcttgatccacggcagccagaccgttttggtcagcagcgccagcggggccagcgttgcctctacgcgtggcaaatgcaccatcgtgacttcgggaatatccggtggattgccaagaatgatgtcttccgcgtgtacatggggccacggcacccagctgcgccagccagtttcttgtttttgccgctcccacaccacgcccagatcgccacggatagcgaacggacgattcaactccgcagagactttctggttgatagtcggtttgagtcgattccagtcaaaagttgcaatcaaaatgatcgccacgacaatcaacaacaagaaagccccactaatcgcagcggttattttgcctgccttgctcatcgttcgcttcctcatattcttcctgtgccagtcctaaagatagtccagccaggcggaaaatgaggcagcttatagcgccagaaccgccgtattcagcgtttctatcggtgccgggcgactaagaaaccagccttgtgcggcgaatgcggggctgttctgaacatcacgccactcttccggcgtttctacgccctcgacaatcaccccgcgacaatagcgattcattagatgtaaaagctgagaaaagagtgtgcgtccttccgggctctgacgcagcatcacaaacagttctcgcgcgattttgatgtagtcataacgcacttcacttagcgcagagaaatttgccatcccggtaccaaaatcatccagccacagcgggccaaattcacacatgctggcaaaggtactatctttcggcagacggatatgctccaccagttcgaaacgcagccagggaagacgctcaatctggcgcaggatttttggttgctgacgcagggcgatgagcgtagggccatcaatattgacgcttgccagcaggccgtgctctataaagaagtcggctttttgcgccagcaaatcaatctgctctttcacaacctccatccgatggctgacggtgatttcagtaaaatagcgatccggcggcaggcgttggctagggttcaagggatgcgtgaccaccgttaatagctccacggccattaaccgcccgcatgtttgatagatcggctgccaggtgtaagcacgctcacactgcaaccaaaaacgccgttcctgcaagctctcgatgcttgcttcagggttgcttattcgctggataacctgccttatcatcaaagatgtcctgtgtttaaaagtgatgctgcccggactcgacaaagattatcggcgcgtaagggcagaactttaccgcctggccggggtaaatttcctcactccacaacggaatctttcaggaatacgttctggctcaaaaaaataatggaacactgttttaatatggttgaccagcaaaccaccacagcgcaaactaacgctaattttttacagatcaggttcacgactatgtccaaaaagattgccgtgattggcgaatgcatgattgagctttccgagaaaggcgcggacgttaagcgcggtttcggcggcgataccctgaacacttccgtctatatcgcccgtcaggtcgatcctgcggcattaaccgttcattacgtaacggcgctgggaacggacagttttagccagcagatgctggacgcctggcacggcgagaacgttgatacttccctgacccaacggatggaaaaccgtctgccgggcctttactacattgaaaccgacagcaccggcgagcgtacgttctactactggcggaacgaagccgccgccaaattctggctggagagtgagcagtctgcggcgatttgcgaagagctggcgaatttcgattatctctacctgagcgggattagcctggcgatcttaagcccgaccagccgcgaaaagctgctttccctgctgcgcgaatgccgcgccaacggcggaaaagtgattttcgacaataactatcgtccgcgcctgtgggccagcaaagaagagacacagcaggtgtaccaacaaatgctggaatgcacggatatcgccttcctgacgctggacgacgaagacgcgctgtggggtcaacagccggtggaagacgtcattgcgcgcacccataacgcgggcgtgaaagaagtggtggtgaaacgcggggcggattcttgcctggtgtccattgctggcgaagggttagtggatgttccggcggtgaaactgccgaaagaaaaagtgatcgataccaccgcagctggcgactctttcagtgccggttatctggcggtacgtctgacaggcggcagcgcggaagccgcggcgaaacgtgggcacctgaccgcaagtaccgttattcagtatcgcggcgcgattatcccgcgtgaggcgatgccagcgtaaacgcagcatatgcaaaaggctggataaagtgttacccctctatccagctcatccataaatacctgatggttgtgctaactcatcaccatcaggcattactgtgcaggtggaatatccgtcacttcaggatgtacgtcatccgtggcgacagaggtggtcgcagcggcggtagatggggccatgatttgatcccagaccgcctgcaacgctttcatgttaaattccggctcgcctttcggctgcagcagtattaacgccatatcattgctcaactgttgacgcagatcctgatttaacatctctaccgtcaggctattaaggaaatcctgccgcagtttctgatattgctccggcgcgatatcgacaacctgattttgcaagctacgcatccgctgacccatcagaatatcggtatcagctcgtgcataggcggcaaacagtttctgcagctccagtttcttttgcgccactaacgcattgaactcttcttccggcagacctttatcgcgaaccttcgccagttcacgcgccaccagattaaggttgctgttcagcttgtcgtttggactttcgatgttgatggcacactgcgcacgcagatacagcacacggcagtcaaatccaagaccgatgtctttgctgttactggcacttaacgcttgctgaacatgccagaacagcgcctcgcgggccaggtccgcacgccagtagcgcagcagtgcggcactttcacgaatcggctgccacggcgtatcccacatgatagataaccggtcctgacgcaccgcgtcagtcataatactcaccgcttccgcacgcagcggagaaagcgtcggcaccggagctggcgtttcacgtttgcctttcagttcgccaaacgttttgtttatttggtcgacaacgctgcgcgcatccacgtttcccaccaccagtagcgtcattgcatccggggtgtaccatttctgatagaaatctttaattttttccgcttcaacgggttgtttcagcggatcggcaggatcgtgacctaacaaggtactccctttcagacgatagcgccaccagccctctttagtatcggcaggccaggttgccaccatgtcctgactttgcagcgcgtggttgatggtttctggtgtgatggtcaatttgccagtggcatttgccagataagagagcgcttctttcagcaaatcgttacggttattgggcaaactcagattaaacagcgtggtgtcataagagacaattaccggcggcatcgggcgtttagggtcgatcccctgctgccacaaactacgcgcctgtgctgcgtcaaggccaccgctttgcgttagcgcaatacgagggatggcgtgactgtaaccgctctgttgtgtactttcggcgaggctaccggtattaaccagcaggcgaatttcaacacgatcgctgggacgctggggggtggtcagcacttgccactgtaaaccgttggaaagcgtcccctgttgccatgctggatcaggctggagcgcatctgcctgcacatagccagcagtggccatcatcagcaaaccgcccgctaaaagtcgaatttttgtgccctgcatgtgaacccctgatcaactatcctggtaataaaaaaactgcccgttgtcggtcagtctaaatgacgttaaaaacacttcgtgttagaccgcaagaacatgaaaatgtcacggaagaagtgaaataaacctgaactcacccaggtggtaagttcaggcacaggggtcaattatgcgcaaacacccgcactcggggaagggagtgcgggcataagtgatgagattaagaggataattcgtgcgttttgccatccggcgcacgattattcagcacatcgtccagttttttgtggtccagttctttcacccacttagcaacgacaatggtcgctacgccgttaccgaccaggttagtcagcgcacgagcttcactcataaagcggtcgataccgaggatcagcgccagacccgctaccggcaaatggcccaccgcagagagcgtcgccgccagcacgataaagccactacccgttacccctgccgcccctttagaagaaagcagcaacacgattaacagcgtgatttggtggacgatatccatctgactgttagtggcctgggcgataaacaccgccgccattgtcaggtatatgcttgtgccatcaaggttaaagctgtagcctgtcgggatgaccagccccaccacgcttttacggcagccgagtttctccatcttgtcgagcatacgcggcagcgcgctctcggaagaactagtccccagtacaatcagcagttcttcacggatgtagcggataaatttgaagatactgaaaccagtcgctttagcgatactacccaataccagcaccacaaacaggatacaggtaatgtagaaacagataatcagctgccccagttgcaccagtgtgccgacgccgtatttaccgatggtaaacgccattgccccgaacgcaccaataggtgccagacgcatgatcatattgatgatgccgaagatgacctggctgaaactttcgatgacgttaaaaatcagttggcctttgctgcccagacggtggagcgcaaaaccaaacagtacggcaaacagcagcacctgcagaatgttaccgctggcaaatgcgccaatgacgctcgccgggatgacatccataatgaaggcgacaatgccctggtctttcgcctgatcggcgtaaaccgctaccgctttcgcatcaagcgttgccggatcgacgttcattccggcaccaggctgcacgacgttaacgatgataagaccaataatcagcgcgatggtactgacaatttcaaagtaaagcagtgcgactgcgccggtacgaccgaccgccttcatgctttccatgcccgcaatgcccgttacgacggtacaaaagatgacaggagcgatgatcatcttaatgagcttaacgaagccgtcgccaagcggtttcatttgctcgcctatttcaggatagaaatggccaaggagaataccaatggctatcgctgtcaggacctgaaagtaaaggcttttaaacagagaggttttcatagggtgtcctttagtaaaaccacaggtcttgtaaggttatggggtacctgcggccttaaaataacacccagacaacatcacagaaatgtacctggatcataattgaaacaaaaaggttaaaaagtttgagctggctcgcacaaaccagcactttttaaagttttgtaatcagtttggggtagttacttttcttccaggtaactctcttcgaagatttcaatagggagtgggcgagcaaaaaggaagccctgggcaataccaacgcccgcttttgccagccagtcgcgttgtgcttcagtctccacgccttcggcaatcatttgtaagttcaggctctgcgccagcatgataattgcagcaatcatgctgctatctcccggcaagccttcaacaaacattttgtcgattttcagtacgtcgattggcaagcttttcatatgctgcagctgacgcagccctgcgtagcccatgccgaaatcatccagcgccacccgaactccggcattgcgcagcggacggaggattgccaccgcagcatgagggtcgtcaatacgtcggctttctgtcacttccagaatcagtgttcccggctgaatgcgatagcgggttaacagttccagcatatccgccaccatattcgggtgcatcagttgcagcgcagagaggtttacgctcaagggcagcataatgccgcgctcttgccaggctgcaagcaatcgacaggactcttccagcacccagtgaccgacggtaaccatcagcccacagcactcaatgcgatcgattaagccatccggcaggtcccaactgccatccggttactggatacgcagtaacacttccgcactgaccagtttaccgctggtcatctcgacctgtggctgtaaccaaatagcaaactgatgattttccagtgcattaaggatatcgctctcttccgtcaaccgcttctgggcggcttccatctgctgcggatcaaagaactgaatctgattcttgcctttatggcgagcggtaaatgccgcagaaatagcgcgactgtaaagctgttcggcggtgagatcgccgtagaacatcgccacgccaatgctacagtgcggacggagttgaatacgttcaatcggcaggcgctcgctcatgatagtgagcacttgctgacctaaggtgattgcgtgccacggttcctgtacaccgttggcaatgacagcaaagtcataaccgctaatctgcgcgaggatcatacgtgggctcagtacgcttttgagtttttccaccagcgtcagcagcagaatttctcgttgcgcctctttcagcacgcccgcagtatcacgcagggtttcacaggtgatgatcatcagcgcggtggtttgtttacgcgcgacaacctgctccagcatctccatcagcaaggctttgttcggcaaatcgctcaccgggaagcgcatcgcattttcgttctgttcttcataatggcgctgcagcaattgctggttgaggttgtaactgcgcaccaacataccgatttcatcgtcctgatgcagacgcggtaatgccagttggtgaccaacaagctccttggctgggatggcgttaagttcgcgagcaatattgcgtaacggatgcaaaatcaggcggttaatgcaccagctgatggcgacggtcaggataaggctcaaaagtaagtaaatggtcactaacgtactgagggtgctcatcacgaacttatacatacggaaggaatccgcctgtagtaccagataggcaattggctgcgggtttgccggacgttcgaggctgtaaacgcccaggctgatttgaaccggtagctcaaacaggcgagtaaccattaccggcaccgggcgctctggaataaaacttttacgcagcgcctggaactggttaggcagcactacatcggcacggctgaccacgcctgccggtttaatgctggcaagaatagcttccgcttcgggaatatcgcctttcaaaatagcactagataagggttcgcggacagagcgagcaatgctttccagttgcgtagccgtgttatagcgattctgctggaccagatggaacagcaaaacggtgcaaaaaataaaaacgaacaccaggacaacggctgccaccattgccatctgcttgattgttaacgagcgacttacgcgcaaattgtctccccccggaaatcccagattgccgcccgagtatacccgatcgcagcggcattaagagaggcgctatctgaaaacttaccagtcggcgtaaggtatcagcggctgcggcggtaaatccatgtcaccctgccatccggcggcggaataacgtacgtagagcaggaaatggctgggtgcgtaatctttcgcctgctggatatcaattgccgtgccaacaaaccagttggaagtaacacgtcgttcaagtaatgcccgcgccgtgtagccgaagccctgactgctgccgccatcgttggattgccgcgcagcttcttcctgccagtcggtcgggatcagattcatcagcggataacgcggcatggttttggtgcgactatggctccagctgccagacgcacccagctcccagctccagttttccgtgcgctcccgccacatcaccggtatggcaaagctcaggtattcctgcggactgtagtaaccgccctgaccgagactgtagccactcagatctttgtcgtaatgccagatcatgttgttcaggccgattgtgacgcggcgattgttctggttaatgaccttatagtaatagcccgtcatccagcgcacgcgccagttatcttcgacatttttaccggttaactggtcgccactaaggcttgcccagacgccgtttgcttcacctttatcgtagctcagacttagccccacaccgtcggcacgtacgccaccccattttttcccggtattgctcggggagtctttttgcccaccaaaggccagcaaagaactggagatgggccgacggtgggcgttaacggtgtaacccagcggcccgatatcatcgctgtaactgatgccgccgaccacatccaccacgttgaagcccatcggcgtggtaccgatatcccagctccagacgtcatttcgccagccgaccgccacgctggcaccggaatcgctctggctgcggttgccgctacagtcctgtaatgtacaggtgccccagttgtcatcccatttgccatcggcattagtggagaaactgccgacgttcatattgacgaaatcactgcgaaagaacatccgcccgtcagaatacggcgcatccacctgcaacatggtagtgtgcgctttcagatcggagtaaccaccggtgccgctgctaccccagtaatcgtgctcaagggtgacgttaagatcctgctggcgatagaggtccgccgcatcgctgcgcacgccacgtttcagccagtcatctttctcgtcgttacgggtcagtcgggtaaaggtgtcgttatcctgcggacgcgtcgtagtcacaccggatgcgaccatggcgtctttgtaggtttccagcgcctgcgttggatcgcccgcctgcgcttcaaacttcgcaccatcacgcagcaccatcgcgctttccatgctcggtggctgagattttgcctgcgggatcaacttattaaacgtccgctgcgctgctgcggtatcgccaagctgcgcctgtgccagcgccacgcgccgctgtgtgttcaggctggcgttatcggtagcgggcagtttcgccagctggctacgtgccgccgctttgtcaccggcagcaatatccacttccgtcagaccaagaatggcgtcggcgttagctggctcccgcgtcaggacattctgatatgcagcgcgggcggcggtgtaatcacgtcgttgttgcgcccagtcagccagcgtgaggtcaatacgcgtggaaggtggttgctggcgcagcatcgcttccgcttctgcctctttgccgctttctcgcaggcggttagcggtttccagcacctgatcgctttgcagtcgattaaccagctcctgaatattgctgttccactgcgcacgcggcaggctattgatatgcgccagcgccgctctgtcctggtcatgaccagagaggtacagcccgtaagcgtaaacctgctccgggtcgttgctcttctgctgcgccagattgcgcattaacgtatcggcctggctgcgttgtccggcctgccagagatcctggctaagtcggtaagtaatccatacgctgccggggtccagcgccagtcgttgccgctgaagtgctgccgcctgcgcccatttgccctggttttccagtgcctctgcctgctgtgccagacggtcgttttgcaggctgcgttcgatatcatcaatgctacgccgctgactggcagagaggctggcgataaacgcttcagctttttctgggctttgctggcggtaaatatttgccagcccgcgcacggcgttagtgttgccgctgtccatacgcaaggtctgctgataataacgttcggcggcgggataatcttttcgcgccatcgccacatcgcccagccccagcactgcataactgtcggtgttatcgacattacgcgcctgctggaacaggcgttctgcccggtcaggattattggctttcagcgcagcatcgccctgctggatcgccagccagtagcggtttactttcagcagactgttccatttgtcgttgttgctgctgtgcgggtccagtgcgagggctttttccagattcgccactgcattggcgcgatcgcctttctgagaatacgcctggcccagcgcccccagagcttcactgtctttcgggttcgcccgcaccgcctgttgtagttcgggaatggctttacccgccataccagagtccaccgccgctaaaccttgcgcacgagcgcggaaagcaggatcggccagctgtttttgctgttctgccagttggctttgcgcagccgccacgctatcgccatcactaaagatgctgagatattttttcagcgcgctcacactggcatcactgacgggcatgtctttaatctgcccgtaccagattttagaggccccttcgcgcccggcgttgctttttgccatctgttccaggacggcaaaaccttcgtcacggcgatcgctactaaacagcaatagcgccagattgttttgcaggcccgtattgcccggtgcatccgcattgatgcgttttaactgattaatcgcttcgccacggcgagccggaattttcgccaccgtactccagtactcgacagcaatgtcaccttccggcggcgcaccgttgaacagtttgttgtaactcgccacagcttcttctgcatgaccggtcgtcgcctgcaatcgtgcctgttgcagtgcctgacgaccatccggcgtggaaagtagcatcgtagtccggctgcttttatacgcattactactcggcgctaactggctcagccgatcgagctgtttttgcgcgccatcaatatcgccctgacgtaacaaagaacggaaacgggcggcaacgacgtccgggttattcggatcaataagttccagccgatataagctctgttgcaccagatcttcacgatgggtcgcttcgcctaaccgaacttgctccagcaactgttgctgagcggttggtgctgcctcgaccatcggcatgacggccagaccgagggaaagcgtgaatatgtttagtgtgaatttgcgcattcctggccccagtcaggtaattactttagtgactatttgcgcattcctggccccagtcaggtaataactcaccttttgtgctgaagcggaaacggtgttgatcccagccttgtccaaacagggtcagcacatagttgtaataggcatcgctgccgggaaagttatcggccacgcgctggcgctgaacggcctgcgcatcgcggttttgtaaaaagggcagcatggcggcagaaaaaccgactggtcctttaccctgcgctttccccgtagccacatccactttttccggcggataaccgtttttctcagtgaatgtcgccatcggtttaaaccggttgagcatccgcgctttttgcggatcgctgtcaggcatcatgcctacccacatgtaaacgcggatagcgtcgtagctgctgatcaatgttttttcggcttttagctgccagcctttgtctttctcatagcgcacccagtctgggctaaaacctttcggggcggtttccagcaataaacgttgattggtttcgcgcagcgtggtccacggcgcgccaaagcgggtgaaatactgcgccagcgtcggcggcaggtagctggggttaaaacgccagctgttatcctcagcaaaacccactttgcccggtaacaacatggaacccagcccaggcaccgtcaccacttcctcccgcgcgatacgttttagcaacgcgctgccgatgtcggtataacgctgctctttccacaaacgccccgcctccagcaagctccaggccatccagacatcaccatcggaggcgctattgctgtccagcacttcccacttactgttctctttcttgccccacagccaggcgggcaaacgttcttttaaagaaccctgagcgagattgttctgcgtccagtcgagaatattatcgaaagctgcacggtcgttagccgccagggcagagaacatgccgtaactttgcccttcggaggtggtgattttgcgcgcgtcgctggggtcgatgacgcgcccttcctgactgatgtaatcctttttaaactgctcccaggcaggccaggtacaggctgcctgaacactaaaggcagccagcagcagcatcgtcacgattccactacgcaacacattcatcttcaattactcgttatccgggttaagacgacgacgactaataattcgcagcagacgccacagtacccatgccagcaatatcacactgatagccgccagcaccgccagcagaatcggatggtttgccagcgcataccacacgcgctcgaaccacggcagatgacctacgtaataaacgtcgccaacacgtaggctgttgataccggactcgcggatcaccgcgacgctaccgaacatggtggcgcgtttgccgctatcgttcaccgcatcgttaagcatttcataaccgcgtgggctatctgccaacagcgcaatcacgctgcgctggtcgttatacgggctctggaagccaatcaccgccgccatcgcaccggaagaggtcagcgtactccgggtttctgccgcgcgatcgctctcgtccggcacaatgccggggaacggggtctggcgcatcggtgttttcacccagctttcggtcgcctgcaccaataggtcgatctgcttatcgtctttcagtttgtccgggataccaccgatgatcatgatgtcggcatctttgccctgaatggtgctgccatcatcggtcaccgtcagattaatcgccgggaagcccgtctgtgcgccgataaaaccaacagtattcagcaacgtttccatctgtgcttcgttaggcgctttcggcatcacggtgatggtttggctcagatccgccatccggctgaatgggaagcccgcgttagcaaaggcgcgtagatccggcatcgggatgaagtggtaatacttgctgaagtcgatggtggagtcgtcaccaatcaccacatgattctgcaccggctggaaggtaatacagttatccacgctaccgcccggcatcgggttcatatactcaaagtcgaagcgcagctggttggtcgcgcccagtttcagcgccggaatagagacatctgttttgccatccagcaaaccttgtaataccggaatccgcagcagcaggcggttcgcctcctgtttgctgctcaggttgaaggattgcaggaactggttattcaggctgatatccatccggctactgtctttcaccggcggcatggtgtagcggtaattaatatccatatcaatgccggtactgcgcatcaggtagagatccggcggcaggtttaggctaacgttaatcgctgctggctcaagaccgctggattgtaactgttcttcataggttttcagttcgccaaatgtgaccggacgatcggtacgtacccagttcggcgcatcgtacggcttacgcggtagcagcggtttcacttcattcactaccacgctttcaccacggaacagaatgttaccctgagcgatacctttcgctgcctgcaacaggtctttgtcgtcacgaccaaacaccaccagcagtttgacgtaaggattctgcggatggttaatcatctcaatcaccggggcttttaccgccggatgatcgcgcaggaagtccggccgtttgtcgttggttgcaaagacaatggcattgcgatccggcagttggttatagagtaccgggaagttctgcccacgccagccagaacggctaccaaaccagctggcgacaatggcagaggcttgttgcagcccaacatccggcgcacccgcaaagaccatcggcaaggtgttggtgcggttatcgctcgggtcaaagaatggcaccgggaagtgactcaggtcattcttcacattcagggtctgataggtcagatccagtccactgctccgcccaacatccagccaaagcgtggtgctggccggtttttcgcacacgtcctgataatggccgacaaactccagccgtacacggttgaagtcgctaataaacagtgggttaatgggcatttgcgccagcgtttttttacccaactgttctttggtcactggcagcacgcccatcagttcatcattgagataaacctttaactggctctggacaggcagtaagcttgggcttggggtgtattcgaagttgagcatcgccttcgtcaccacttcatcgctgcgcataccaaactcaatgctgccgttcgggttaatgccacgtagcaccatgctgcccggcggcggtgcaatttgcgcaaaggtcagcttcacatcacggctaggaccgttctgcgccacgactggcgcatcagcgccctgcacgcccggcatcacttgccccacctgcggattttgttccgtctgggcggctacagctggctcagcattgatcagtggttgcgttgctggcgtcgcctgcgtcatgaaagaggggaacgcactcatccccatagccactgcacaaatccagaatagttttcttttcatcgcgttatcatcattgttgagccaaagcctgatcgcttggttgtgccgtttcgctccgctccgggcggcgcggaataaagcttacaacccaggaaaccagagaagtcagcacacggaatatgcccttcacgctagaaggcgcaaactccgccagatggcggtagccacggaagccgagcttcagaatatccagcagactttccagcggcttatcttccgggtagctgtcctgccagagcgcccatgtatccgcacgggcaaacgtacactgcacaaaatcgatatgttgctgggtggtgagcggcattaatttcagcccaacttcattacccatcacgcgcgccacctgggtcgggaagacgtattcctgctgaccgcgtttaagcaacagattcactttctgcccttccagaatctgcgcctgaccgttgatcttgatccccaaaccaccgtcggagaaatcctgaacggtacagctgaagaggtgaccatcttcgcgggcaattgccgcgggcatcgtcatctccacgcggtggcttcggcgtacctgtttgctttctacgcttaccgcaactgcgccgccaagaacaatcaggttgtagaacacccacaccatactgacgaccacggtgagcatctcggttggcgggccatagaagtagcgccagatgcctaccgcaacgcccaccaggttgagcaggacaaggaagatgtagggccggctgatcacccagtcgacgtactcttcttccaccagtccacctttggcggtgacgttaaatttgcctttgtgcgggttaatcagcgccaccagcgtcggtggtgcgatataccacgccagcaccgtttcgtagatttcactccagaaagagtggcgatatttgccctggatcttggagttggtcaggctggcatggatcatatgcggcagcacgaatagggcgatcatcaacgctggcgcatagatgatgtaggcatgaagcagcaggaacgccagcggcgcagtcaggaagatcagccgtggaatgccgctcaagaagtggaacatggcgttgacgtaacatagccgctgagcaaacttcagccctttaccggtgagcgggttatcgagacggaagatttgtaccatcccgcgcgcccagcgaatacgctgaccgatatgcgcgctcagactttcggtcgccagccccgccgcctgcggaatacgcatatacgcggaggtatagccacgacggtgcaaccgcagagaagtatgcgcatcttcagtcacggtttcgacagcaatgccgccaatttcatccagcggcttacgacgaatcaccgcacaggaaccgcagaagaaagtggcgtcccacatatcgttgccatcctgcaccagaccatagaacagcgtgccttcgttcggcgttttacggaaacgccccaggttgcgttcaaacgggtccggactgaagaagtggtgcggcgtctgcatcatcgccagctgtttttctttcaggaaccagcccatggtcatttgcaagaagcttcgcgttggtacgtggtcgcagtcgaaaatgctcacgaactcgcctttggcatatttcagcgcattgttgatgttgcctgctttcgcatgttcatgagtggtgcgggcgatatatttcacccccacgttttgcgcaaactggcgaaactcttccctgccgccgtcatcaaggatccagatattcagcttatctttcggccagtcgatacccaggctggcgtaaatggtatttttcaccacgttgagatcttcgttgtaagtcgggacaaagatatccacgctcggccacaggctcatatctttcggcaatggcaccggctgacgattcagcggccatactacctggaagtagccgagcaccagcacaatccacgcgtacgtttcagcgaagagcagaataagcccgcacaccaggctgaccggatcgtcccagttcagcgtagaggtgtaacgccaccagatataacggcaagaaacggtcaggctcagcacaatcaacattagcgcgctgaagcgccccggcatccgccgtacgatcagcgctaccccccacagcagcatcaggaagataaactgcgccagcgggttaaacggctgagtaacgcagattaacgccagaatcaggctgaaggtgacgatgataccgaggatcaaccgccgcgccccggcactcaaatgaccgagctcttttttctcatccagatgctgtgttttatggctaacgcgctcaggcagctcgttcatccattgatggtaacgtccacgaatattttgcagaccactaaatgcccgcctgcgcggtttcggcgtttctttgcggcttgcaccgatcaataaccagcatgtttgaatgagataacggaccgggtccagcggacgcggacggctggcgttgatatgcggatacaggtttttatgttctgcgcgaatacgctgccagcgcgggtgctccagcggaataaaaatccaggccaggatcatccagaaacagccgagcgtcgcgctgaaagcgctcgcaccgtgacgacgataatcgcgataacgcccgataagccgcgcgttgaccggcgggataagcaaccaccgggtcaggatactcatgatgcactcccgactggcgtttacatcaacttgcactcccgactggcgttttcagcccggagtagttcaacaggcaccagttcgccagcgtcagtatctcttcagccgccagcgcatcactgcgatattcacctactggttgcttagccgccaggcattcagccatcgcttcatcacgatgaatgagcatcggcagtaatcggcgctggctttgcaaccaaagctggtaaatatcgtcctgaacctgactgccaatacggaagtcattaatcaaaatatgtgcgccatccggcagcgcttgctgatgcagtcggatatggcagttggcatccacattgacgattgccaggctgtgatcgcacaaactcagcagctggtgggttatctggctggcatcacgcggtaagtcgattaaaatccactggtaacgcccgctggcttttagttgctgtaagccggagcaaatatcgctcagccgggtttgccagtgctgtggattttcttgttcttcaatggataactgaccaaaaggcagcaaatcgagctggctggtgtagcgcaacccagcgtcacgccagtcctggccatccagcatcgctctggcccagccctgacggtgggtaaaatcaacattaaaactcaggcgcaacaagttgtccgggcaggcatcgaccaccaggacattttctcccaacatttgtaaactccaggctaatgcggcggtgatggttgttgtccccacgcctccccgcaccccctgctatcccagtacggccattcaccaatcccttacttttgttgcgcaaactctgccagcaacggccagcgttttaatgccgcggccaactgttcgcgttgggaaatatcggcataatcaatatcaggcagactaaatgcctgctttaacgccacaatatcattctggaagatatagcctatcgcgggatcaggcagagtatctggttcattgttattcattttgcttgatccctatgaaataaccgtaccgttcatgagacaattctaaccgtgagcatttcgccggtttattgtttacggcgagacgggaatttgctcactttttgactttccgttacgcaacagaaaaagttaaaaacgaaaagactaaaatcacacgtcttgtgaccttctaaattgattcacatgctaaatctgataagttttaatttcaatggtaggtttatttcttagctttcgctagtaaactgataatcagacaaaatggtgacatgagggacattgtggaccctgtattctctatcggtatcagtagtttatgggatgagctgcgacatatgccagcaggcggcgtctggtggtttaacgtcgatcgccatgaagatgctatcagtctggcgaatcaaacaattgcatcccaggctgaaaccgcacacgtcgcggtcattagcatggacagcgatccggcgaaaatctttcaattagatgattctcaagggccggaaaaaataaaattatttagtatgctaaatcatgaaaaaggtctatactatttgacccgtgatttgcagtgttctattgatccccataattacctttttattcttgtttgcgcaaataacgcatggcaaaacattcctgccgagcggcttcgcagttggttggataaaatgaataaatggagcaggttaaaccattgtagccttttggtaattaatcccggaaataataacgataaacaatttagtttgttgcttgaggaataccgtagtctttttggtcttgccagtttgcgttttcagggtgaccaacatttgctggatattgccttctggtgcaacgaaaaaggggtcagcgcccgtcagcagcttagcgttcagcaacaaaatggtatctggacattagttcaaagcgaagaggcggagatccaaccacgcagcgacgaaaaacgcattctgagtaatgttgctgtactggaaggtgcgccgccgctaagcgaacactggcaactgttcaacaataacgaagtcctgttcaatgaagcccgtaccgctcaggcggcgacggtggtcttttctttacagcaaaatgcgcaaatcgagccactggcccgcagcattcataccctgcgtcgccagcgcggtagtgcgatgaaaatcctcgtgcgggaaaataccgctagcctgcgcgccaccgatgaacgtttgttattggcctgcggtgcaaatatggttattccgtggaatgcgccactctcccgttgtctgacgatgatcgaaagcgtgcaagggcagaagtttagtcgctatgtgccggaagatatcactaccttgctgagtatgacccagccgctcaaactgcgtggtttccagaagtgggatgtgttctgtaatgccgtcaacaacatgatgaataaccctctattacctgcccacggtaaaggcgttctggttgccctacgtccggtaccgggtatccgcgttgaacaagccctgacgctgtgtcgccctaaccgtaccggcgatatcatgaccattggcggtaatcggctggtgctgtttctcagtttctgtcggattaacgatctggataccgcgttgaatcatattttcccattgcctactggcgacattttcagtaaccgtatggtctggtttgaagatgatcaaatcagtgccgagctggtgcagatgcgcttgcttgccccagaacaatggggcatgccgctgcctttaacgcaaagttctaaaccggtcatcaatgccgagcacgatggtcgccactggcgacgaataccagaacccatgcgactgttagatgatgctgtggagcgcagtagttgatataagatgctgtggagcgctcatcatgatgaccatcagcgatatcattgaaattattgtcgtttgcgcactgatatttttcccgctgggctatctggcgcggcactctttgcgacgcattcgcgacaccttacgtttgttctttgctaaacctcgttatgttaaaccggccgggacgttacgccgcacggaaaaagccagggcaaccaaaaaatgactcaatttacgcaaaataccgccatgccttcttccctctggcaatactggcgcggcctttccggctggaacttctattttctggttaagttcggcctgttgtgggcgggatatcttaacttccatccgctcctcaatttggtgtttgccgcgtttctgctgatgccccttccgcgctacagcctgcatcgcttgcgccactggattaccctgccgatcggctttgctttgttctggcatgacacctggttgcctggcccggaaagcataatgagccagggtagccaggtggcggggttcagtaccgattatttaatcgaccttgtcacacgctttattaactggcagatgattggggccatttttgttttattagtggcctggttattcctgagtcaatggattcgcattaccgtttttgtggttgccatactgctatggctgaacgtacttaccctggcgggaccaagtttctccttgtggccagccggacaaccgacgaccactgtaacaacgacgggtggtaacgcagcggcaaccgttgcggcgacgggtggcgcaccggtagtgggtgatatgcccgcacaaactgcaccgccaacaacggcgaaccttaacgcctggctgaataatttctataacgcggaggcgaaacgtaaaagcaccttcccgtctagcctgcccgctgatgctcagccatttgaactactggtgattaacatctgtagcctttcctggagcgatatagaagccgccgggttgatgagccatccactgtggagccatttcgatattgagttcaagaactttaactccgccacctcctacagtggcccggcggcgatccgtttactgcgcgccagctgcgggcagactagccacactaatctgtatcaaccggcaaataacgactgctatctgtttgataaccttagcaaactgggctttacccagcacctgatgatgggacataacggccagttcggcggttttttgaaagaagttcgcgaaaatggcggcatgcagagcgaattgatggatcaaacaaatctgccggttattttgctgggctttgatggtagcccggtttatgacgataccgctgtgcttaaccgctggctggacgttaccgaaaaagataaaaacagccgtagtgccacgttctacaacacgcttccactgcatgacggcaaccattatccgggggtcagcaaaacagcggattacaaagcgcgggcgcagaaattctttgatgaactggacgccttctttactgaacttgagaaaagcggtcgtaaagtgatggtggtcgtggtgccggaacacggcggcgcgctgaagggcgacagaatgcaggtatctggcctacgtgatatccctagcccgtctatcaccgacgtccccgttggggtgaaattcttcggcatgaaggcaccgcatcagggggcaccgattgtcatcgaacaaccgagcagcttcctggctatctccgatctggtggttcgcgttctcgatggcaagattttcaccgaagacaatgttgactggaaaaaactcaccagtgggttgccacaaacagcaccggtctccgagaacagtaatgcagtagttattcaataccaggataaaccgtacgttcgcctgaacggcggcgactgggtgccttacccgcagtaagaacgaaaaaggccgcagagtttcccccctgcggcctggtccgggcgcaaattgccattacggcagcctgacgcccgcatgacacgttacttccgcttgttcagccagttcacgatcatactggcaagaatgccagcaatgaccggagccgctaaatcatgccagaaggccatgcccagctctgcgaacgtcatatagccgcctgtgttgtaatgacaacgtttcgcggctattcttgagtggtctagagtcaagattagcccccgtggtgttgtcaggtgcatacctgcaacgtgcgggggttttctctctccagcaaccaatgccaccagggataaagcccccgcaacattgcgcctcaccggaacctttccggcttgccgctgattctacgattgctttttactgtcagcacccggcaatcttcctcattgcgcgatgccttccagcttaatttctttatttgcaatagttgcagttcatatccgggctgactccagactggtagtgaaatgcgcaattttgtagaattgcgcctcctcgcgacctccccagtgaatctgttgcctcattttttacatactgcgtattcgacttctccacctgttgcgcaagagaaactgggtttattcatttttgcgaggccgacttctttctggacaggactttatgcagcacaacacactaagcaaacacaatcagaaattgccgtttacacgctacgacttcggctgggttttattatgcataggcatggcgattggtgccggaaccgtgctgatgccagtacaaattggcttgaagggaatttgggtatttattaccgcagcgatcattgcttatcctgccacctgggtagtgcaggacatttatttaaaaaccctttctgaaagcgattcctgtaatgactacaccgatattatcagtcattacctggggaagaactggggaattttcctcggggttatctactttttgatgattatccacgggatttttatctactctctctccgtggttttcgacagcgccagctacctgaaaaccttcggtttaaccgatgccgatcttagtcaatctctactttataaagtcgctattttcgccgtactggtggcgattgcgtctggtggtgaacgattactgtttaagatttccgggccaatggtggtggtcaaagtagggattattgtcgtgttcggttttgcgatgatcccgcactggaatttcgccaatataaccgccttcccgcaagcctccgtctttttccgcgatgtcttgcttaccattccattttgcttcttttctgcagtatttattcaggtacttaacccaatgaatattgcctatcgtaaacgggaagcggataaagtactggcaacccggctcgcgctgcgtacccaccgaattagttatatcacgctcatcgcggtgatcctgttttttgcctttagctttaccttcagtattagccacgaagaagccgtttctgcctttgaacaaaatatcagtgcactggcgctggccgcgcaggtgatccctgggcatatcattcatatcacctctacggtgcttaatatctttgccgtactgaccgcattctttggcatttatctcggtttccacgaggccattaaaggcattattctcaatctgttaagccgaattattgataccaagaaaattaacagtcgcgtgctgactctggcgatctgcgcttttatcgtcattacgttgacgatttgggttagctttcgtgtaagcgtgctggtgttctttcagttgggaagcccgttatatggtattgtgagctgcctcattccgtttttcctgatctataaagtcgcacaactggaaaaacttcgcggatttaaagcctggctgattctgctgtacggcattttgctatgcttgagcccactgttgaagctgattgagtaaaccggagcgcatggccccggttttgtgagttaacgctgcggattttcatcctgatcaacagcaaaacaagctaccagttgaccgccgtagtcttttagctgcggctgcaactgggtgcaggggccgaagcgccgacgacagcgggcgttgaaggcgcaacccggcggtggattcagtgggcttggtagttcaccgctgagcttgatgcgctcgcggcgatcgtccgggttcaggcgcggcgtcgcggaaagtagcgcctgagtgtacggatggcgcgggttattgaagatttggtctttcgttcccttctccacgcagcggcccaggtacatcaccatcacttcatcagcaatgtgctccaccacgctcaggtcgtgggagataaagacataagacagccccaactcctgctgcaaatccatcatcagattcagcacctgcgcgcgcacactaacatccagcgcggaaaccggttcatcggcaatcaccacatccgggtcgagcatcagaccacgggcgatggcgatacgctgacgctgaccgccggagaacatatgcggatagcggtcatagtgctcggttttcaggccgactttcgccatcatgctcagggctttttcccgacgctgttctttgcttaagctggtgttgatcagcagcggctcttcaagaatttgcccgacttttttacgcggattcaggctaccgtaagggttctggaagacgatctggattttctgccgacgcagcttctgcgcctgcggatcgtgcttaagcagatcctgcccctggtaatacagctcgccaccggtgggcatttcaatcatcgtcagcaaccgaccgagggtgcttttaccgcagccagattcgcccactactgccagcgttttgccacgttcaaggttaaagctaacgccatccagcgctttaaccagacgttccggcgcgaacatgcctttcttcaccggataatgttttttcaggtcgatagcctgcaacagcggttgttgcagggtggcctcttgcgtactcatagtgtcggcctcccggcatcatcaagtgggtaatggcatttggactgacgcccgtcagcgagcatattcagcgccggttcttcagcgcgacatctgtcagtggcataggggcagcgcgggttaagcaggcagccgttcgggcggtcgtacttgccgggaacgacacctggcaagctcgccagacgttctttgtcctgagcaaattctggcagcgcacgcagcaatgcctgagtatacgggtgacgcggcgcatggaagatggcgtgcgcatcaccggtttccaccacctggcctgcatacatcacgatgattttatgtgccgcttccgccaccagcgccaggtcatgggtaattaacaccagcgccatgttctctttctgctgtagctccagcagtagttcgatgatttgcgcctgaatggtcacgtccagcgcggtggtcggttcatcggcaatcagcagttttggccgacaggcaatcgccatggcgatcatcacgcgctggctcatgccgccggaaagctgatgcgggtaaacatccagacggcttgccggatcgggaataccgacctgattcagcaggtcaatcgctcgctgacggcgggtacttttgttgccgccctgatgcaccttaatcgcttccataatctggaaacccacggtgtagcacgggttaaggctggtcatcgggtcctggaagatcatcgccacttcggcacccaccaggttgcggcgctctttttcactgatacgctgcaaatcctggccgttaaactccagtttttctgccattacgcggcccggataatcaatcagccccataatcgccagactactgacgctcttaccggagccggactcacccacaatcccgaccacttcgccctgttttacgctgtagctgatgcggtctacggcgcggaacggcgcgctttcgtcgccgaaatgcacgcttaatttatctacatttaataacgccatctcgaacctcttactgcttcagtttgggatcgagcgcgtcacgcagaccgtcacccatcaggttaaatgccagcaccgtcagcaggatcgccagacccgggaaggtcacgacccaccaggcgctttgcgcgaactgcaacacgtcggagagcatggtgccccactcaggcgttggcggctgtgcccccatgccgaggaaaccaagagcagccatatcgagaatggcgttagagaaaccgaggctcgcctgaacaatcagcggcgcaaggcagttcgggaagatgttaataaacatctgacgcatcgccccggcacccgccacgcgagacgcggtgacgtaatcgcggttaacttccaccagcacggcggcgcgggttaagcgcacatagtgcggcaaggcaacgaaggtcagtgccagcgcggcgttaccaatgctcgggccgaaaattgccaccagcaccagcgccagcagcagacttggcagcgccagcatgatatcgaccacgcgcataatgatgttatcgaccaggccgccaaagtaaccggcgatcaggccgagaataacgcccataatcaggcttaacacaattaccagacagccaaccagcaggctcaggcgcgcaccgtacatcaggcggctcagcacatcacggcctacgtcatcggtgcccagcaagtgcgccatgctgccgccttcctgccaggctggcggggcgagcagtgcatcgcggaactgttccgccgggttatagggtgcaatccagttggcaaagatcgcgatgaacagcacgatgacgacgtaaaccagcccgacgaccgcgcctttgttgcgtttaaaatagtgccagaactcctgtaacggggtcatcggcaccggtgcgctaatcactttattttcagtaacctgactcatgatgtccccttacttcttatgacgaatacgcgggttcaccacgccgtacagcagatcgaccagcaagttgacgaggataatcatcgtcgccaccagcaatacgccgccctgcactaccggatagtcgcggcgttgcagtgcgtcaatcaaccagcgtcccagaccgggccagctgaagatggtttcggtcagaatcgcccccgccagcaatgttcccacctgcaggccgataacggtcaccaccggcagcatcgcgttacgcagcgcatggacgataatcacccgcatgcgggttagccctttggcgcgcgcggtgcggatgtaatcctcgcccagcacttccagcatgctggagcgtgtcatacgcacaatgaccgccagcggaatagtacccagcacaatggcaggcaagatcatatgggcgacggcatcgataaagttgccgtcttcaccccagatggcggtgtcgattagcataaaaccggttaacggattggagtcatcgaggaacaccatatcgctcacgcgaccggagacgggcgtcaggttccagtgcacgctaaccagcatgatcagcatcatgccccaccagaagataggcatactataacctgtcagcgccaggccaaccgctgtgtgatcgaaaatggaaccgcgtttaaccgcagccagcacgccgaccggaataccgactgccgtagcaaaaatcatcgcgcagacgccaagttccagcgtggcctggaagcgcggcacgaactcttcccaaaccgggatgcggcttttcatactaatgcctagatcgccatgcataacgccccaaatgtaatggagatactgctgccacatcggtttatctaagccgagttcagccagcagctgcgcgtgacgctctggggagatcccacgttcgcccgccatgatcatcaccggatcgcccgggatcatgtggacaaaggcaaatgtgagaagggtaataccgataaacgtggggatgacgagtcccaaacgtcggagaataaactgcaacataacccggattctctatagtgacccgcagcctggaactgcgtgtctgtattgctcacaaatcaattcccgcccttatcggacagggaatgaagtattgctgccggatggcgctgcacgcagaggcacagcgccaccgggtatacagattgttgacaaagtgcgctttgtttatgccggatgcggcgttaacgccttatccggcctacaaaatcgtgcaaattcaatacattgcagaattttcgtaggcctgataagcggagcgcatcaggcatttttgcctttgccatcagtcttgtatggcttttaattattcgatagagacgttttcgaagtgatgtttgcctaatggatcaaccacatagcctttaacttctttacgtaccggttcaaacacggtggagtgagcgatgatcagtgccggagcctgatcgtgcatcaccacctgcgcttgtttgtacagttcaacgcgtttattgtggtcgtcggtagcacgcgccggttgaatcagatcttcaaacggtttgtagcaccatttactgtagttggagccttgttcagaggcggcgcagctgaacaggatggcgaagaagttatccggatccccgttatcgccagtccagcccatcattaccgtctggtgctcgccatctttcgcacgcttgaggtactcaccccattcgtaggtgacaattttggcctgcacgccgactttcgcccagtctgcctgaatcatctccgccatgcggcgagcgttcgggttatacggacgttgtaccggcatcgcccacaggtcgatggagaaacctttttccagacccgcttctttcagcaaggctttcgctttttcaggatcgtaggtgtagtcctgaacgtcgtcgttatagccccacatggttggcgggatcaggtttttcgcacttacgcccgcgccctgataaaccgctttgatgatcgcgtctttgttcaccgcgtaggtcagagcctggcgaactttcacgtcatcgagtggttttttctgcacgttatagctgagataaccgacgttcagccccggcatttccatcagattgatggatttatcctgcttcatgcgagcgatatctgccgggttcgggtacggcatcacctggcattcattcttctgcaatttcgcgtaacgcacggaagcgtcaggggtaatagagaaaaccagcgtatcgatctgcggtttggtgccccagtagccatcaaacgctttgtagcggatacgggaatctttttgatactgctgtaactggaacggaccggttccgattgggttgaggtccagtttttccggtgtaccggctttcatcatcgcatcagcatattctttactcagaatagaggcgaagtccattgccaggtcagcgaggaacggcgcttccgggcgagtcagcacaaactgaacggtgttgtcgtccacctttttcacttcactgatcagctctggcaagcccatgccttcgaagtattcgtagctgccgccagaaactttatggtacgggttttgcgcgtttttctgacgatcgaagctgaacaccacatcatcggcgttcagttcacgcgtcggtttgaattctttattgtcgtgccacttcacacctttacgcagatggaaggtataggttttaccgtcttcgctgacttcccacttttcagcgaggcccgggatcacttcggtggtgccgattttaaattcaaccagacggttataaagcgggacggaagaggcgtcataggtggtgccggaggtaaacagctgcgggttaaacccttccggagatccttcactgcaataaaccagagttttagcctgaacacttgctgcgacggtcatagccaccaggctgagaccaagcttcagcatcccactctttttcaaggaaatacgcattattctgctccaattgtgatgtttgttgttttaaccctttgcagtgggttgtcgctgcctgaccttttttgttttttgcccggtcgggtcaacgttatgaggtggggatgccgtactaattaacatcagtgtaacagtgcggatcctccataaaatgcccctcgtgacctacaatctgtcaacagaatgtgaaaacgtcaatacagccaaccgggatttacaccaacggtgagaatccacacacaaagattaaaaaaacttcaaacagctatttgcagcagagaaatttgtgctactccaacatgaccagaacaatcagcttaatatttagcaacatttggtgattaagttttatgcatttaatgaaaaaaatctgaggaaaaggtggatatctgagcgattaataccatgaacgctaaaacgcacagcggaaaatgccagggccagccataagtaacgcaaaaaaagatttaagcaaatataaaaaaagacaatggtttctgtcacaaatccgttaatggatagtgagatatggggcgcaaatttggcagggaaatgtgtgtcgtgtaggtcgaataaggcggtcgcgccgcatccgacaatggccggcacatttgcctgatgcgacgctgacgcgtcttatcaggcctacgtcgagtcgaacctccctgcccccggaggttctcatcctcatgagctgcagatgcaaaaaagcctgctcgttgagcaggcttttcgaatttggtcggtgatagaggattactcgccacttcgtggctcgccctgcgggccgttgctggcgcaacgttctctcgcttcgctcgagtcgaacctccctgcccccggaggttctcatcctcatgagctgcagatgcaaaaaagcctgctcgttgagcaggcttttcgaatttggtcggtgatagaggattcgaacctccgaccccttcgtcccgaacgaagtgcgctaccaggctgcgccaatcaccgaatgcggggcgcatcttactgcgcagatacgccctcgtcaatcccttaatagcaaaatgccttttgatcggcgagaaagtcagcaggccgcttagttagccgctgcctcttttgcctgcgggatgtgacaccagttgttgttttcgttaattccaccatccggactagtatagccaagacaacccatgatggtatcgtacagctctacgtgacggcgtggcactttcatgtcggcttcttttttcagctgcgcaaacgcctgcgcattggccggattttccagatatttatcactcatccagaccatcatcggtacgcggaactgctccggcggtgccagttcacgcggcgtgccgtgcaggtgctcgcgttcattaatactctcaccgtggtcagctgcgtagaacacaatcgctttcttatcgcgaacctgatcaatcacgctggagataaagtgatccacataggtcacgctgttgtcataggagttgatcatctgcgctttggtacagccgctatcaacaccaatacattccggcttccactgcgcgaagctacgcggataacgctgggtgtagttaaaatggctacctttggtatgcagaatgatcagatgcttaccatccgggttgcgccctaggctttgctgcatttcgtctaccagcaacatatcatctaccggcttgccacgattacgtggctccgcaccaatctgctcacgataagcaatgttgtccgccatcgtgttgctgtagaaccacatttcgctctgcatagcgtagaggtcagaactgaatcctaactgcttcagaaccgcgaaaatgttctgttcttttaatgtgcgctgcggattatcttccgcgcccccctgacgtacaaacatgcaacgcagactgagtttggttgcggtatcacaggagtaaccacggaacgccgccagatttttctcctgggccagtttcggcgtggtattacgctcatagccgaaaatacccatatggtcccaacgcgtggtttcaccgatgataaacacgacataagtgtcatcaacgttttgcggtgcctgataagtgaatttcttcgccggattaagcaaactattattatcggaagattcatcgacccgcgcccaggcatacagccccaacgcagaaagccagttacttggcagataagagttcgctacgacaccgccataactcggcaaatcaacgccggtcgccctctccactttcttctgctggatatccagcaaacgaatcggtgcccaaaccataatacccgccagtacgacgaccgccaggctgcgaatacgctgccctggggttcgcagttgtcggagcaaggtgtagcgacagcggttattccagataaggataagaggcaatgcactaacggcgattaaccagagaataaagttcagaccaacaacttctttactcaggtcgatatcggtggtcatgacggaagcgatgatgccataaccaatgaccacattaaggaaggtcatgtaatagctggcacctgcggaaaagagcaccaccaggcttgccagaatacgccagctgcggcggccaaacaggctaagaagacgtagtaaaaagaaggtcaccagtacggtggcggccagttcaacaacagcagaaatgcctttccagacggtaaaatcgtgcgcatagctgccgaagcggcggtaaaaaaccgcgccattcataaaaaggccaatatagattgcaagcaaaaagctcagcttctgctgtgtaatgcttttgatgtatctcatgcaaacaaaccctggacaaacaggtgataacaccctgcttagtggcttttcaggcccggcagggaaaaagtgcggaggtagtcagataagtaaaatctacacgcgcgaataagtagaccacagcaaagggaaaaagtgtggggaaagagtgtgcatgaagcacaaatttacaaaaatgcaagtttgaaaagagactttagcgttacaaaaagcagtaaaaagggccagttaattggcccaaattttacgagtcattgtttatacatttcgttgatgcgtttgatgcacacggaagctgaagcccagtagctcgcggctgagcattaaagggagccatgcgcctcacgcaacattttctgctctggctgacgaatcgtcgtagaaagcgccaaactcagaatcagcagggcgaaaatcacgtagaaggtcacatagaagccgccaaacagactggcgataatgctaccacaaatgctaccgataccgaaaccgagataaatcacaccgtagtttttcgccaggttattgaggccaaagaactcactgaccagactcggaaagacggtaatagtgccgccaaagttaaatgccacgcaggcaatcgctgcaaagaacgtcactgcattcaatggtgcaaacagcagggccgccatacccaccaggcttatcacctgaccaatggtaataacacggatacgggcgattttgtcagacagaatacccagcaccagacgaccactaaggttggcgatggaaataacagtgactgcattggctgcggaaaccacatcaaggtgtgccagactttgggcgatatctttcgctaccccaatcacgtacaggccgctcatgcaggcggtcaggaacattaccgctaacatccagtactgcggtttacgcatgctctctgccagcgtgtaatctttctccaccacaccattgctggttttcacttcctgttttggtgcgtctttcattaacgttgcgccgaaaacaatcatcaacagcgcaatcgctccccaaatcacaaaggttttttccagaccgaccgtttccagcagctgcgtgtcgataaatttgaaacccaggctacccagaccataagaaccgatagcgaacgcggagatcagacctttacgctccgggaaccacttcacacagttagagagcgtcagcagataacccgcgccatctgccagtcccaccagcacaccggcgcttaaccacagcatcatcaggttgtcagaatgcgctgtcaggaagaagcctaatcccagcaaaatgccggaagccatggtgacgcgtttaacgccaaaacgttcctgtaatttgcccgcaacagaagagctaattgccagccccagacttaacaagccgaaagagaaagcgacctggcttaccggcgcatccagcttggcggaaagcgcgccattaaacaggctccaggtataaacgctccccagcgcaaactgggtaatgatagtaccgatgagtgtcagccagcgggtacgctgataattactaggtgtcatggcagtattcctgcagtaataaaaaggaaaaatctctgccgacaaccataacgaagtgcactttatgcctggggaaaaacggcatgaaatgccatcagaacggaatgaaatgccttagttcaggaatgaatgacgcgacaattattcaccaaatttattatttggtaagttagcacccactatcgccacaactattgttatttaatggtttcaattgtgactgttacgttaaaatctggcgctaacccccatcgtatacagatagtcgctattattagtggtattttctgcctgagttagcgcggcataggcggcaatattttgattgagcaacatatcagcgcctacggtgacatccagccagttgccgttctggtttgtcgccgtcatccggctcaggccactttgcgccttccagatattctcgccaaattgctggttatagctgatttgcgcccagggtcggagatcgccaagccgggagtcaacacgccagcctaaggtactcacgctggcatgccataacggatcggtcagcgtggtagtactgtcgccaaactcgttatacatgctggtggttgtgccatcgtaatgtaatgccgcgaccgggccggttgtaacctgttcatataaaggaaaattccagcccatactcatactgctggtcacatccacaggggtttcttccgccagattgacttccagtcccagcgccctttggctactttgaatacgttggctcaaaatatcgttgtaatcaggttgatgatcactatcccaggtgtaacgctctgtggaaagtccgggttgcgtatcaacgatatattcttgttgccaggcgtaagctgtgttgagaaaaaaggcactgattaccacgctcgccagcaggcttagctgccagcgaccaccgcttttttttatgatcattaacacgactccagggaagagccgaattcggcaatattattgtcattgtatgaaggatatcgggcatagtagccctgtattaaatattgactttttcaccgatgcgtcaagaaaagcggctgaaatttttacgatcgggtacatagcgagggaaagtatggaacgttgcggctgggtgagtcaggacccgctttatattgcctaccatgataatgagtggggcgtgcctgaaactgacagtaaaaaactgttcgaaatgatctgccttgaagggcagcaggctggattaagctggatcaccgtcctcaaaaaacgcgaaaactatcgcgcctgctttcatcagttcgatccggtgaaggtcgcagcaatgcaggaagaggatgtcgaaagactggtacaggacgccgggattatccgccatcgagggaaaattcaggcaattattggtaatgcgcgggcgtacctgcaaatggaacagaacggcgaaccgtttgtcgactttgtctggagctttgtaaatcatcagccacaggtgacacaagccacaacgttgagcgaaattcccacatctacgtccgcctccgacgccctatctaaggcactgaaaaaacgtggttttaagtttgtcggcaccacaatctgttactcctttatgcaggcatgtgggctggtgaatgatcatgtggttggctgctgttgctatccgggaaataaaccatgattcgggaagcgcaacgtagtgaactccccgcgatcctcgaactgtggctggaaagtacaacctgggggcatccctttataaaagcgaattactggcgtgactgcattccgctggtgcgggatgcctatcttgccaacgcgcaaaactgggtctgggaagaagacggtaagcttctcggttttgtcagcattatggaaggccgatttctggcagcgatgtttgtcgcaccgaaggccgtcaggcgcggtattggtaaggcgctgatgcagtatgtgcagcagcgccatccccacctgatgctggaggtttatcaaaaaaatcaaccggcgataaatttttaccaggcacagggttttcacattgtcgattgcgcatggcaggatgaaacccaactacccacatggattatgagctggccggtggttcaaacgctgtaattaactgctggccggtggttcaaacgctgtaagtgtcagttccggaccgttgtatttttccagccatgccagcgccgtattacccgcacagccattccccagccggctgctggggagatctttggtcagcacgttcactgcgccgtttttacaaataccgtcagcggttaaatccagatccggccatgccccttcgtgaatgcaaatcacgccaggtttaattccctcgctaatgaccgctccggcaagaatttgcccgcgtgcgttccacaaccgaacagtatcgccatcttgtatgccgcgctcctgggcatcgtcaggatgaatggtgacaggctcacgatttgccaccgcgtacaattcgcgcagagaactgtaattcagctggctgtgcaggcggtgcgccggatgggcagaaagtacctgcaactgttctggttcggcattgccctgccattcgtccggctccagccacattggatgcccagggcaatccgggtaaccgtaatcggcaatacgctgactgaagatttcaatcttgccgctggcggtttttaacggatgcgccagcggatcgcggcaaaaatcagcgaagcgaataaaccgctcgctgtccgggttttccggcatctcaattaactggttggcttgccagaactcagcaaatggcggcaattcaacctgctggcttgccccgcgctgtcgggcaacgttataaaacgtttccagccattgcagctcactttttccttccgtaaaacgtgcataaccgcccttctcccagcgttcacttaactcggcaaaaacatcaaaatcattacgcgcttcatagcgtggcggcaccacttgcttcatcggcaccagatgctgattactgtaatcaccggtcatggtgagatcattacgctcaaaagaggtagtcgcaggcagaacgatatccgcgtgttttgccgccgccgtccagaagcattcagagatcaccaccagctccggtttttgccaggcacggatcaggcgattggtatcctgatgatgagtaaagttggcaccgcccgcccaccagataaaacgaatatccgggaaatgtcggttcataccgttgtgttgatatgcgccaccagggttttccagtgcttcaacaatgcgggcaacagggattttatccaccgcatcgcagccacccggcaagctgccctgcatggaagagagcaccgcagaacgccgcgtggggttaccaccattggcaaaatggtaagaaagaccaaaaccgccgccgggtgtgccgatttgccccaacattgctgccagcgtgacgatcatccagtgtttttgctcaccaaactgttggcgctgcattccccagcctgccatcagcatggtggtattttggtggaaaatagccgccagctcgcggattttcgctgcgccaacaccacaaatctctgctgcccattcggcggttttcgctattccgtcactctcgcccagcaaataagaggcgaagacggcataacctgtggtgcaacgcgccagaaacgcttcgtcgtgccaaccattttccaccagcgtatgggcgatccccagcatcagcgcaacatcggtgcccatgtgcggtgccacccactccattttatcgccaaagaaatcgacggtttcgcttcgcattggatcaatgcagatcagctttttcccgctgtcacgcagtgcagaaaagtaagaaagcccctgctcatcggatgcattccacgcaattttcagcgtattgagtgggttagcactccacagcaccacgacatcgctatgttccagcaccagcggccaactggtctgctgttgataaacttcactaccacccacgacatacggcatgatcgcctgtgccgcgccggtgctataatcccccagatgcccggtataaccgcctgccagcgccatatagcgttgtaataatgtgctggccttatgcagcacgccgttactacgccagccgtaggaaccagcaaaaatgcttgccggaccataagcctcacgaatgcgtttatgttgttggtgaataagatccagcgcctcatcccaactcacgcgaacaaattcatcctgcccacgaatgccttgcgggttttccggactcgcaagaaagccttttcgcaccattggaaatcgtacccgcgtattgctgtgaacctggtcgcgaaccgcgctctgcaaggagttttccattcctgtggctaacgcgccacggctgctaaacacggtttcgccgtcggtttcaaccagcatgggcccccaatgggcggcagtcagaacggaatatcgtgaggatgagttggccaaaccgaagactcctgaaaggttagatgtattgagcagttaaatattacttacaaatttccgagtattcccaggaataatcttcatgttcacgcggcataatctcccgccacggaacccgtggcaaagaataaaaaggttattaaggattaacaatgaagaaacgtgtttatcttattgccgccgtagtgagtggcgctctggcggtatctggctgcacaactaacccttacaccggcgaacgcgaagcaggtaaatctgctatcggcgcaggtctgggctctctcgtgggcgcgggtattggtgcgctctcttctagcaagaaagatcgcggtaaaggcgcgctgattggcgcagcagcaggcgcagctctgggcggcggcgttggttattacatggatgtgcaggaagcgaagctgcgcgacaaaatgcgcggcactggtgttagcgtaacccgcagcggggataacattatcctcaatatgccgaacaatgtgaccttcgacagcagcagcgcgaccctgaaaccggcgggcgctaacaccctgaccggcgtggcaatggtactgaaagagtatccgaaaacggcggttaacgtgattggttataccgacagcacgggtggtcacgacctgaacatgcgtctctcccagcaacgtgcggattccgttgccagcgcgttgatcacccagggcgtggacgccagccgcatccgtactcagggccttggcccggctaacccaatcgccagcaacagcaccgcagaaggtaaggcgcaaaaccgccgtgtagaaattaccttaagcccgctgtaatccctttcatgccaggtgatgcagaaatcacctggcattcttcagttttccttcatcatatttcaggctaaggtgatcgccttatcagtgaatggagagaagcatgaagccgtccgttatcctctacaaagccttacctgatgatttactgcaacgcctgcaagagcatttcaccgttcaccaggtggcaaacctcagcccacaaaccgtcgaacaaaatgcagcaatttttgccgaagctgaaggtttactgggtagtaacgagaatgtaaatgccgcattgctggaaaaaatgccgaaactgcgtgccacaagtacgatctccgtcggctatgacaattttgatgtcgatgcgcttaccgcccgaaaaattctgctgatgcacacgccaaccgtattaacagaaaccgtcgccgatacgctgatggcgctggtgttgtctaccgctcgtcgggttgtggaggtagcagaacgggtaaaagcaggcgaatggaccgcgagcataggcccggactggtacggcactgacgttcaccataaaacactgggcattgtcgggatgggacggatcggcatggcgctggcacaacgtgcgcactttggcttcaacatgcccatcctctataacgcgcgccgccaccataaagaagcagaagaacgcttcaacgcccgctactgcgatttggatactctgttacaagagagtgatttcgtttgcctgatcctgccgttaactgatgagacgcatcatctgtttggcgcagaacaattcgccaaaatgaaatcctccgccattttcattaatgccggatgtggcccggtggttgacgaaaatgcactgatcgcagcattgcagaaaggcgaaattcacgctgccgggctggatgtcttcgaacaagagccactgtccgtagatagcccgttgctcagtatggccaacgtcgtcgcagtaccgcatattggatctgccacccatgagacgcgttatggcatggccgcctgtgccgtggataatttgattgatgcgttacaaggaaaggttgagaagaactgtgtgaatccgcacgtcgcggactaagccgcgactgcgtagagtaaagcccgataatcgctcgggcttttactctttattgggttgcagtaactgctgtagtccaggcctgattaaacgcctgatgctgtgccggtaatggcgcaatcagtttgttatattcacttgcctgctgactagtcgggaactggatgccatttgcgacaaagctcacctgagtaccttgctgagcaatgtagtctccaaccatcaccagttgttgcgtgaaagtttgtgccgccggaatcaacggttgcaatgcatcagctggcgtcgttaccactttggtgaatgcctgatcaaagaccggtttcaaatcatcgctctgttttagcgcagagtgcgcagcatcggcctgcaacttcgcattttgcagttgttgcgccagcacacccaggctaccgttcatttcacgcagcggaccgctttgcgtaacgtaatcctgcggtacgcgaattgcgttaacgctgtctacaaccgggcgcagaccggaatccatcgcctgattcacctgctgagaataaccatacagaatcgcgtaatcagagacaaaaggaccaaactgttttttctgatcggcagtcagggttggtagacgttcaccgctacgcatcactgtattctgcaggaagtcgataaacgctttacgctgatcgccttctttatcaaaacacccactcaggctaactaccattaataacgccgcaagaggcgcaaaccagcgagagcaggactttcctgtcgccattttcttactcctttcacccaaaaaaagcgcacaacgacacacgcgtgtctgacgtgacaaggatagtccaggacaggcttgcaggataccctttctacgtaatcttcctggtaaaatcatggagaaaatgaaacaaggttaatttgttgtttcattgttaaaaaatgatagtgccgttgccttttttgtagccagagatttacgccttcgcagaaggttagattttcgaaatctttacaaaacaggagtggtaagagatatatcggcatttatcagatcgttaggtggctataagtcacgctaaatgacaggctgaatcgaatcatagccagagcatgccctgacttcaccccgctgtgtctgcttttcccgactattcttaatgagcttcgatgcaattcacgatcccgcagtgtgatttgaggagttttcaatggaatataaagatccaatgcatgagctgttgagcagcctggaacagattgtttttaaagatgaaacgcagaaaattaccctgacgcacagaacaacgtcctgtaccgaaattgagcagttacgaaaagggacaggattaaaaatcgatgatttcgcccgggttttgggcgtaagtgtcgccatggtaaaggaatgggaatccagacgcgtgaagcctagtagtgccgaactaaaattgatgcgtttgattcaagccaacccggcattaagtaagcagttgatggaataaacttttatccactttattgctgtttacggtcctgatgacaggaccgttttccaaccgattaatcataaatatgaaaaataattgttgcatcacccgccaatgcgtggcttaatgcacatcaacggtttgacgtacagaccattaaagcagtgtagtaaggcaagtcccttcaagagttatcgttgatacccctcgtagtgcacattcctttaacgcttcaaaatctgtaaagcacgccatatcgccgaaaggcacacttaattattaaaggtaatacactatgtccggtaaaatgactggtatcgtaaaatggttcaacgctgacaaaggcttcggcttcatcactcctgacgatggctctaaagatgtgttcgtacacttctctgctatccagaacgatggttacaaatctctggacgaaggtcagaaagtgtccttcaccatcgaaagcggcgctaaaggcccggcagctggtaacgtaaccagcctgtaatctctgcttaaaagcacagaatctaagatccctgccatttggcggggatttttttatttgttttcaggaaataaataatcgatcgcgtaataaaatctattattatttttgtgaagaataaatttgggtgcaatgagaatgcgcaacgccgtaagtaaggcgggaataatttcccgccgaagactcttactctttcaatttgcaggctaaaaacgccgccagctcataactctcctgtttaatatgcaattcacacagtgaatctcttatcatccgggtgaaaaataaaagcgtgaaacaaatcactattaaagaaagtaatctatatttctgcgcattcccagcctcctgtgttgatttccaacgagtataactttgatttatagtcaggtggggcttttctctgtctgcctttcggtgaatacctgagacaaacagtctcaagcacccgtggctattctagcttaataagtttgtttcttctccttgatataatcctaaaaaaatctcataaaattaatatatgagataatctttattcagcagaagattattaaaggttgctgtattatttagcgataaaaaaagcctgccagatggcaggctatttaataacggcgttattattgcaacaggctaatatccgcaacgcgcaggaacagttcgcgcagtttctccagcatggtcagacggttgatacgcaattctttgtcatcaaccatgaccatcactttatcgaagaaagcatcaaccggttcacgcagctcagccagttcgaccagcgcatcctggtaacgaccttccgtaaagtacggctccagcttgtcacgtagcaccacaacctgcatcgccagtttaatttcttccggctctttcagggtagaggcattcacgcggtcgctcagcacttcgtcagatttcgccagaatgttagatacacgtttgttcgccgccgccagtgcagcagctgcatccagggtacggaaatggcttaccgctttcatacgggcatcgaaatcagccggacgagtcggacgacgcgccagtaccgcctggatggtgtcaacggtataaccttcgtcctgataccaggcgcggaagcgaccgagcataaagtcgataacatcatcaactacgttggcattagtcagcttatcgccatacagacgcaccgcttcttcggtcagcgtttgcagatcaaggttgaggttcttctcaacgataattcgcagcacgccaagcgcggcacgacgcagcgcaaacgggtctttgtcgcctttcggatgctgaccgataccgaagatacccgccagggtatccatcttgtcagcaatcgccagcgcacaagctactgggttggacggcaggtcatcaccagcaaaacgcggctgatactgctcattcagcgccaccgcgacatcttccgcttcgccatcgtgacgcgcatagtgcatccccataacgccctgggtgtcggtgaactcgaagaccatgttggtcatcaggtcgcacttagacagcagacccgcacgggtagcgtggttaacgtcagcgccaatctgttcagcaatccagccagccagcgcctggatgcggtcagttttgtcgcgcagcgtccccaactgttgctggaacaacacggtttgcaggcgcggcaggttatcttcaagacgttttttacggtcggtgttgaagaagaactcggcatccgccagacgcggacgaacgactttctcgttaccggagataatctgctgcggatctttgctttcgatgttggcaacgaagataaagttcggcagcagtttgccgtcgttcgcatacaccgggaagtatttctggtcacctttcatggtgtaaaccagcgcttcagccggcaccgcgaggaatttctcttcgaattttgcggtcagaacgaccggccactccaccaggctagccacttcttccagcaggctttcgcttaagtcagcgttaccgccaatcttacgcgctgcttcttcggcatcggctttaatcttcgccttacgttcttcgtaatcggcgatgactttcccacgctcacgcagaatttccggatactgatcggcgttatcgatggtgaattccggctcgcccataaagcggtggccgcgaatcacgcgatcggactgaatgcccagaatggttgccggaatgactttgtcgcccagcagcagggtcacggtgtgcaccggacgcacgaagtgcacgtcgcttgcgccccaacgcatcagtttcgggatcggcagtttcgccagagaagtcgcaaccatattcggcagcagtgcttcggtgctttcgcccttcacatgggcgcgatacagcagccattcgcctttatcggtagtcagacgctcagcctggtcaacggtaataccgcaaccacgcgcccaaccttctgccgctttgctcggtttgccttcagcgtcgaacgcctgggcaatcgccgggccgcgtttttcgatttcacgatccggttgcgcttccgccaggttagctactttcagcgccagacgacgcggagcagcaaaccattgaacggtgccgtgtgcgaggccagcgctatccagctccgcagtaaagttcgcagcaaaggactcagccaggctgcgcagtgcttttggtggcagctcttcagtgccgatttccaccagaaaagttttctcagacatagccgcctcttacttatctttgttgcacatcgggaagccgagggcttcacgggaagcgtagtatgcttctgccactgctttggtcagggtgcgaatgcgcagaatgtagcgctgacgctcggtgacggagatggctttacgcgcatccagcaggttgaagctgtgggcggctttcagaatacgctcgtaggctggcagcggcagcggattttccagcgccagcagctgctgcgcttctttctcgtactgctcgaagcaggtgaacaggaagtccacatccgcgtattcgaagttgtaagtggactgctccacttcgttctgatggaacacgtcgccgtaggtggttttacccagcgggccgtcgctccagaccaggtcgtaaacgctgtctacgccctgaatgtacatggccagacgttccagaccgtaggtgatctcgccggtaaccggtttacactccagaccaccaacctgctggaagtaagtgaactgcgtcacttccatgccgttcagccacacttcccagcccagtccccaggcacccagcgtcgggttttcccagttatcttccacgaaacggatgtcgtgaatagtcgggtccatgcccagctctttcagagaaccgaggtacagctcctgaatattgtccgggcttggcttaatgaccacctggaactgatagtagtgctgtaaacggttggggttttcgccgtagcgaccatcggtcgggcgacgagaaggctgaacataagcagccgccatcggttctggccccagctcgcgcagacaggtcattgggtgagaggttcccgcgccgacttccatgtccaatggttgaacaatggtgcagccctggcgagcccagtaatcctgtaaggtcaggaacaagccctggaaggtcctggtatcaaacttttgcatattatttcgtgctggatacgtgtggatttaaaggaagggatcagtatacccgctggatggaagatatacagtacgaaacgggaaaaagcagggcttaacgcatggaaagatgcaaaaaatggccatccgcgtcaaaagaacagacaaactgctctttacggaaggtataaccgcgcatttcatagcttccctggaactgttcgaaggcggtgacgtcgattttttgctcgccggtgttataacgttttgccgcctgatccttgcataacgcttccatattcaagctacgcagaggatcaacctttacccgttgtgctttctgcacgggactcggtatagaacaacccactagcaccataagcgccattgccggaaagaaagcgttcatcatcattaaattaccgtctggtttgcaggtgagtcttattatttatatcggtatagtggctgatatcttacgaatttccttaagcctctataagctgtagtgataaaactcagattattccagtgcgccaaccaaatgatttatcggtcagactttttttaaccagatacagagacacagatgcagcccaaaatttactggattgataacctgcgagggatagcgtgtttaatggtggtgatgattcacaccactacctggtatgtgaccaatgctcatagtgttagccccgtcacatgggatatcgccaatgttctgaattctgcctctcgtgtcagcgtgccgctatttttcatgatttccggctatctcttttttggcgaacgcagcgcccagccgcgccatttcttgcgtatcggcttatgtctgattttttatagcgcaatcgcactgctctacattgcgctgtttacctccatcaatatggagttagcgctgaaaaacctgctgcaaaagccagtgttttaccacttgtggtttttcttcgcgattgcggtgatttatctggttagtccgctgattcaggtgaagaacgtcggcggaaaaatgttgctggtgctaatggcggtgattggcattatcgctaacccaaacacagtgccgcagaaaattgacggttttgaatggctgccaattaacttatatatcaatggcgatactttttactacattctgtatggcatgttgggccgcgctatagggatgatggacacacagcataaagcactgagctgggtgagcgccgcgctgtttgcgacgggggtttttattatctctcgcgggacattatatgaattgcagtggcgcggaaattttgccgatacctggtatctttactgtgggccgatggtttttatctgcgcaatcgcgctattgactctggttaaaaacacgctggatacgcgtaccattcgcggacttggcttaatctcccgccatagtttgggtatatacggattccacgccttgattatccatgcgctgcgcacccggggaattgagcttaaaaattggccaatactggatattatttggatcttttgcgcgacgttggcagcgagtttgttactttctatgctggtacaacgaatcgacagaaacagattagtgagttaagtaaaagcccggtcacattggactgaccgggcttacgtgagttattcgctgtattcttcctgggtaacctgtgtttcttttggtgggtttattccggcatcacgaatatttttctgcaccgctactgcaccaaacaagcttaagaagaaagccagtccataaaaacctttttcgctgagtaataatgtcgcattccacagacctaccatcagtaatgcaacagagataataaagacagtcaggcaggtcatataataaatggaagtggtcggtatgccttcatacttgtcccgaacggtcttttgataagacgccgcagaaaacagtcctaataccagtacggcaaaataatatcctttttcatttaactgcatctctgcattccatagccctaacagataggtaacgataccaccaacgagagctatccaactcacaatactaaaggccggactataggtacttattttgttgtccatcacagtattcctttcattcctgaatatgtaagagctttatgttgctcatgcgctgcgaaacaaacgcatttgaccaaacaagcagacaaaaaaggcgatgggatagatcaccatttcataagtattgataggtgcgtttaaaacaccgataaacaagagaccgatagtgattaacgcaactaactggcagatatgggtaaaaaaatcatccagttgcccgagtttttctgcgcgaagatatgcatagttgccaaaagttgctgtcattaacacgccaagaaaatagccttttccacttaacaatgggcaactgatccatagcccaaccagataaaccagcgccccgacaacaaataatagtttcgccacagtcttactggttttcataacgatctccatatctaccagcgatacattacgagtaaccaacgaaagacaaaactgaaaaatgccattaacaaatgattttcagaataaattcatactaaatattaattaattactgagatatatagatgtgaattatcccccacccggtcaggcaggggataacgtttacgccattaatggcagaagttgctgatagaggcgacggaacgtttctcgtcgtggctgataagcggcataacgctgcgcatctggtagatggctctgttctaacggtagttgcggcaacaattcaatgaggcttttctctggattcgccgcgatctgcgccagccttgctgcgcccagtgctggccccacatccccccccgtacggtaatcgagctgctgaccgctgatatccgccagcatctgacgccagtactcactacgcgccccgcccccaatcaacgtaacactttgcggtttaataccgcaggcatgcacgacatccatgccatctgccagcgcataacccacgccttccagcactgctcgcgccagttcattggggccatgttgatgagtcaaaccaaagaaaacccccttcgcctggggattattgtgtggcgtacgctcgccggaaagataaggcagaaaccaaactggctcggcactttcatcagcctgttgagctgcagcgattaaagctgggacattgctcaggccggttaatttcgcggcccaatccagacagctcgctgcactcagcatcacagacattaaatgccaacgttgcggtagcgcatggcaaaagctatgtacggcgctttctggcttgcttaagaacccttcgctgacagcaaaatagaccccgctcgtccccaggcttaacattgcctgattagcatcaaccattcccacaccaactgcaccagctgcattgtcgccaccgcctgcgacaactggcaccgtcgccataccccacgctttcgcaacttcaggtaacaaagcaccagtaatttcgctgccttcgtataatgcgggcatctggtcacgagataagtcgcaagcctgcagcatgacgtcactccagtcacgctttgcgacatccagccacatggtgccagctgcgtcagacatatcgctggcaaactcccccgtcatacgcagacgcaagtaatctttcggtaataatactttgtcgatttgacggaatatctccggctcatgccgctgaacccatagcaatttaggcgcagtaaatccgggcatcatcaggttgccggtaatcacccggctttgcggaactcgcgcttccagcaaagtgcactcttgcgcacagcgcccgtcgttccacaaaatggcagggcgtaacacccgttgctgagcatccagcaaggttgctccgtgcatctggccggcaatacccaatgctttaacgtcctgcagagaatgctgatcgcccagagctttcattgcgcgatcagttgcctgccaccactgttccgggtcttgttcgctccagagtggatgcgggcggctaacggtcagcttttccgtttgcgcagcaaccacctcaccctgctcgttgagcaaaataacttttacgccgctggtgccaagatctatcccgatatacatatcgatcgttccttaaaaaaatgcccggtatcgctaccgataaccgggccaacggactgcacagttagccgttatttgtcgaacagataatggtttaccagattttccagttgttcctggcgaccactctgatgcaccggagacaaatgatgttcctgagcatatttggctaaatctgccagactcatttggcctttcaggatttgctggcccaattcgctattccagccggaataacgctgcgcgatgcgtttatccagctcgccatcttcaatcatgcgcgctgcaattttcagcgccagtgccatcgtatccatcgcgccgatatgaccgtaaaacagatcatatttatcagtactttgacgacgtactttggcatcgaagttcagaccaccggtggtgaaaccgcctgctttgagaatttcatacatcaccagcgcattctcttccacactgttcgggaactggtcggtgtcccagcccagttgcgcatcgccacggttggcgtcgacagaaccgaacaggccaagcgcaatggcggtggctatttcatgatggaaagagtgacctgccagcgtcgcgtggttagcttcaatgttcagtttaatctctttttccagaccaaactgtttcaggaagccatagaccgtcgcggcatcgtaatcatattgatgtttggtcggttcttgcggtttcggttcgataagcaacgtgccctggaaaccgattttatgtttatgctcaaccaccatctgcataaagcggcccagttgttcacgctcctgacgcaagtcggtatttaacagcgtttcgtaaccttcacgaccgccccacaggacatagttttcaccgcccaatttatgggttgcttccatcgctgtaacaacttgcgttgccgcccagctgaagacttcaggatctgggttcgtcgccgcacccgcgccgtagcgagggtttgtaaagcagttggccgttccccacagcagcttcacgccgctctcttcttgcttgcctgccaggacatcaaccatttgcgcaaaattattgatgtactcttttaagctcgcgccctcaggggaaacatccacatcgtggaagcaataaaatggcacatgtaacttgtggaaaaactcaaatgcgacatctgctttacgcttcgccaacgccagtgcctcaccaggctgctgccacggacgattaaacgcccccacaccaaacatatccgccccgttccagcagaaggtgtgccagtagcaggcggcaaaacgcaagtgctcttccatacgcttacccaacaccagttcgtcgggattgtagtgacggaatgctaacgggttactggatttactgccttcataacgaacgcgatcgagctggtcaaaataggcttgcatattgaactccataatcaggtaatgccgcgggtgatggatgatgtcgtaatattgggcactccctttcagttgctcaattatgttatttcacactgctattgagataattcacaagtgtgcgctcgctcgcaaaataaaatggaatgatgaaactgggtaattcctcgaagagaaaaatgcaataagtacaattgcgcaacaaaagtaagatctcggtcataaatcaagaaataaaccaaaaatcgtaatcgaaagataaaaatctgtaattgttttcccctgtttagttgctaaaaattggttacgtttatcgcggtgattgttacttattaaaactgtcctctaactacagaaggccctacaccatgaaaataaagaacattctactcaccctttgcaccagtctcctgcttaccaacgttgctgcacacgccaaagaagtcaaaataggtatggcgattgatgatctccgtcttgaacgctggcaaaaagatcgagatatctttgtgaaaaaggcagaatctctcggcgcgaaagtatttgtacagtctgcaaatggcaatgaagaaacacaaatgagccagattgaaaacatgataaaccggggtgtcgatgttcttgtcattattccgtataacggtcaggtattaagtagcgttgtaaaagaagccaaacaagaaggcattaaagtattagcttacgaccgtatgattaacgatgcggatatcgatttttatatttctttcgataacgaaaaagtcggtgaactgcaggcaaaagccctggtcgatattgttccgcaaggtaattacttcctgatgggcggcagcccggtagataacaacgccaagctgttccgcgccggacaaatgaaagtgttaaaaccttacgttgattccggaaaaattaaagtcgttggtgaccaatgggttgatggctggttaccggaaaacgcattgaaaattatggaaaacgcgctaaccgccaataataacaaaattgatgctgtagttgccagtaacgatgccaccgcaggtggggcaattcaggcattaagcgcgcaaggtttaagtgggaaagtagcaatctccggccaggatgcggatctcgcaggtattaaacgtattgctgccggtacgcaaactatgacggtgtataaacctattacgttgttggcaaatactgccgcagaaattgccgttgagttgggcaatggtcaggaaccaaaagcagataccacactgaataatggcctgaaagatgtcccctcccgcctcctgacaccgatcgatgtgaataaaaacaacatcaaagatacggtaattaaagacggattccacaaagagagcgagctgtaagcgttacgccccagcgcggagcgggggcgtgatttctctccatgccgcgtgaatgaattggcttaggtggagtcgttatgccttatctacttgaaatgaagaacattaccaaaaccttcggcagtgtgaaggcgattgataacgtctgcttgcggttgaatgctggcgaaatcgtcagtctttgtggggaaaatgggtctggtaaaagtacgctgatgaaagtgctgtgtggtatttatccccatggctcctacgaaggcgaaattatttttgcgggagaagagattcaggcgagtcacatccgcgataccgaacgcaaaggtatcgccatcattcatcaggaattggccctggtgaaagaattgaccgtgctggaaaatatcttcctgggtaacgaaataacccacaatggcattatggattatgacctgatgacgctacgctgtcagaagctgctcgcacaggtcagtttatccattagtcctgatacccgcgttggcgatttagggcttgggcaacaacaactggttgaaattgccaaggcacttaataaacaggtgcgcttgttaattctcgatgaaccgacagccagtttaactgagcaggaaacgagcattttactggatattattcgcgatctacaacagcacggtatcgcctgtatttatattagccacaaactcaacgaagtcaaagcgatttccgatacgatttgcgttattcgcgacggacagcacattggtacgcgtgatgctgccggaatgagtgaagacgatattatcaccatgatggtcgggcgagagttaaccgcgctttaccctaatgaaccacataccaccggagatgaaatattacgtattgaacatctgacggcatggcatccggttaatcgtcatattaaacgagttaatgatgtcagcttttccctgaaacgtggcgaaatattgggtattgccggactcgttggtgccggacgtaccgagaccattcagtgcctgtttggtgtgtggcccggacaatgggaaggaaaaatttatattgatggcaaacaggtagatattcgtaactgtcagcaagccatcgcccaggggattgcgatggtccccgaagacagaaagcgcgacggcatcgttccggtaatggcggttggtaaaaatattaccctcgccgcactcaataaatttaccggtggcattagccagcttgatgacgcggcagagcaaaaatgtattctggaaagtatccagcaactcaaagttaaaacgagctcccccgaccttgctattggacgtttgagcggcggcaatcagcaaaaagcgatcctcgctcgctgtctgttacttaacccgcgcattctcattcttgatgaacccaccaggggtatcgatattggcgcgaaatacgagatctacaaattaattaaccaactcgtccagcagggtattgccgttattgtcatctcttccgaattacctgaagtgctcggccttagcgatcgtgtactggtgatgcatgaagggaaactaaaagccaacctgataaatcataacctgactcaggagcaggtgatggaagccgcattgaggagcgaacatcatgtcgaaaagcaatccgtctgaataacgcattgaggagcgaacatcatgagcaaaagcaatccgtctgaagtgaaattggccgtaccgacatccggtggcttctccgggctgaaaagtctgaatttgcaggtcttcgtgatgattgcagctatcatcgcaatcatgctgttctttacctggaccaccgatggtgcctacttaagcgcccgtaacgtctccaacctgttacgccagaccgcgattaccggcatcctcgcggtaggaatggtgttcgtcataatttctgctgaaatcgacctttccgtcggcagtatgatggggctgttaggtggcgtcgcggcgatttgtgacgtctggttaggctggcctttgccacttaccatcattgtgacgctggttctgggactgcttctcggtgcctggaacggatggtgggtcgcgtaccgtaaagtccctagttttattgtcaccctcgcgggcatgttggcatttcgcggcatactcattggcatcaccaacggcacgactgtatcccccaccagcgccgcgatgagtcaaattgggcaaagctatctccccgccagtaccggcttcatcattggcgcgcttggcttaatggcttttgttggttggcaatggcgcggaagaatgcgccgtcaggctttgggtttacagtctccggcctctaccgcagtagtcggtcgccaggctttaaccgctatcatcgtattaggcgcaatctggctgttgaatgattaccgtggcgttcccactcctgttctgctgctgacgttgctgttactcggcggaatgtttatggcaacgcggacggcatttggacgacgcatttatgccatcggcggcaatctggaagcagcacgtctctccgggattaacgttgaacgcaccaaacttgccgtgttcgcgattaacggattaatggtagccatcgccggattaatccttagttctcgacttggcgctggtagtccttctgcgggaaatatcgccgaactggacgcaattgcagcatgcgtgattggcggcaccagcctggctggcggtgtgggaagcgttgccggagcagtaatgggggcatttatcatggctagtctggataacggcatgagtatgatggatgtaccgaccttctggcagtatatcgttaaaggtgcgattctgttgctggcagtatggatggactccgcaaccaaacgccgttcttgattttgataaaaattttctcaaagccggttacgtattaccggttttgagtttttgcatgattcagcaggaaaagaaccatgtttactaaacgtcaccgcatcacattactgttcaatgccaataaagcctatgaccggcaggtagtagaaggcgtaggggaatatttacaggcgagtcaaagcgaatgggatattttcattgaagaagatttccgcgcccgcattgataaaatcaaggactggttaggagatggcgtcattgccgacttcgacgacaaacagatcgagcaagcgctggctgatgtcgacgtccccattgttggggttggcggcagctatcaccttgcagaaagttacccacccgttcattacattgccaccgataactatgcgctggttgaaagcgcatttttgcatttaaaagagaaaggcgttaaccgctttgctttttatggtcttccggaaagtagcggcaaacgttgggccactgagcgcgaatatgcatttcgtcagcttgtcgccgaagaaaagtatcgcggagtggtttatcaggggttagaaaccgcgccagagaactggcaacacgcgcaaaatcggctggcagactggctacaaacgctaccaccgcaaaccgggattattgccgttactgacgcccgagcgcggcatattctgcaagtatgtgaacatctacatattcccgtaccggaaaaattatgcgtgattggcatcgataacgaagaactgacccgctatctgagccgtgtcgccctttctagcgtcgctcagggcgcgcggcaaatgggctatcaggcggcaaaactgttgcatcgattattagataaagaagaaatgccgctacagcgaattttggtcccaccagttcgcgtcattgaacggcgcagtacagattatcgcagcctgaccgatcccgccgttattcaggccatgcattacattcgtaatcacgcctgtaaagggattaaagtggatcaggtactggatgcggtcgggatcagccgctccaatcttgagaagcgttttaaagaagaggtgggtgaaaccatccatgccatgattcatgccgagaagctggagaaagcgcgcagtctgctgattagtaccaccttgagcatcaatgagataagccaaatgtgcggttatccaagcctgcaatatttctactctgtttttaaaaaagcatatgacacgacgccaaaagagtatcgcgatgtaaatagcgaggtcatgttgtaacgatgatgagaattgtcggcgtcacatcaggtaacgctgcgtggttgtcggatgcggcgtgaacgccttatccgacctacccgccaggcatgataaaacgcaccaacaacgcttcaggctcgtagctcaactgcctgagacaaagtaaaaagccttatccgactgacaagtcggataaggctcaaggaaatgcaattacatatgcgccgcgattaaccgttggttatcctggtacattgcgaacaggtagttgttataactcttccctttggtgctgtagcccttcagcttgtgaatcatcgctgtggcagtcacttcctgatccgctttacgcagctgcgcacggcttttacggaagctagagtaagccgggtgcgtattcaggttagtgacataggcgctcacgctttctttgacagaactaaactgactgtaccctttcactttacctggcgcattggtacaacgtcctttcatgcatttcatgccgaacaggttgttgttgttgcgcgccagcttgctcgttccccaaccgctttctgctgcagccatcgtcgccaccatactggtggggataatgtctacgcgttcaagcaaggtattccacgggatttttcgcgtattaccggaccacttcaccttgtagcgtttggcgatgtctttcagacgcgcacgctcagcaggactccattggccctgatactgtttactaatgagccagttacgttccgcagtaatggccgcattttggctggtaatgtaaggcattacggtccggagaaacgcctttttccttggtgttccggaagggtattttcgcaaatcaggaagactactactctttgcactattgcgagaatactcttgtttactgcttacctgtttattactagctttagttaagtgggacttttgactcgctgttgttgtgtgcgtcttcgctaacacctcactgctaaacaccagagtgagtaacataagaatcatcgccccatatcgtcgtatgggagtcaaaatcatcaggtctcctggtcggatttaatcattccaacaccttatatttttcacaaatttgagagttgaatctcaaatcatatcaaaaatagctgtcaagagcaccccaaggaatagtccaaatctgaaactatgtcacgtgttaacgattcagattggcgctaaatcgcagaaaatgtgggggttatcgcaaaattcagccgttttttgcgcgagatcgctcacccttgcttctcatcctgtggacttaccgctcagggatgagttttgtttggcttatcgctggcaaactgtctgaaatcgcagcaataaggactcatccgccatgaaactcgccgcctgttttctgacactccttcctggcttcgccgttgccgccagctggacttctccggggtttcccgcctttagcgaacaggggacaggaacatttgtcagccacgcgcagttgcccaaaggtacgcgtccactaacgctaaattttgaccaacagtgctggcagcctgcggatgcgataaaactcaatcagatgctttccctgcaaccttgtagcaacacgccgcctcaatggcgattgttcagggacggcgaatatacgctgcaaatagacacccgctccggtacgccaacattgatgatttccatccagaacgccgccgaaccggtagcaagcctggtccgtgaatgcccgaaatgggatggattaccgctcacagtggatgtcagcgccactttcccggaaggagccgccgtacgggattattacagccagcaaattgcgatagtgaagaacggtcaaataatgttacaacccgctgccaccagcaacggtttactcctgctggaacgggcagaaactgacacatccgcccctttcgactggcataacgccacggtttactttgtgctgacagatcgtttcgaaaacggcgatcccagtaatgaccagagttacggacgtcataaagacggtatggcggaaattggcacttttcacggcggcgatttacgcggcctgaccaacaaactggattacctccagcagttgggcgttaatgctttatggataagcgccccatttgagcaaattcacggctgggtcggcggcggtacaaaaggcgatttcccgcattatgcctaccacggttattacacacaggactggacgaatcttgatgccaatatgggcaacgaagccgatctacggacgctggttgatagcgcacatcagcgcggtattcgtattctctttgatgtcgtgatgaaccacaccggctatgccacgctggcggatatgcaggagtatcagtttggcgcgttatatctttctggtgacgaagtgaaaaaaagcctgggtgaacgctggagcgactggaaacctgccgccgggcaaacctggcatagctttaacgattacattaatttcagcgacaaaacaggctgggataaatggtggggaaaaaactggatcagaacggatatcggcgattacgacaatcctggattcgacgatctcactatgagcctagcctttttgccggatatcaaaaccgaaagtactaccgcttctggtctgccggtgttctataaaaacaaaatggatacccacgccaaagccattgacggctatacgccgcgcgattacttaacccactggttaagtcagtgggtccgcgactatgggattgatggttttcgggtcgataccgccaaacatgttgagttgcccgcctggcagcaactgaaaaccgaagccagcgccgcgcttcgcgaatggaaaaaagctaaccccgacaaagcattagatgacaaacctttctggatgaccggtgaagcctggggccacggcgtgatgcaaagtgactactatcgccacggcttcgatgcgatgatcaatttcgattatcaggagcaggcggcgaaagcagtcgactgtctggcgcagatggatacgacctggcagcaaatggcggagaaattgcagggtttcaacgtgttgagctacctcagcagccatgatacccgcctgttccgtgaagggggcgacaaagcagcagagttattactattagcgccaggcgcggtacaaatcttttatggtgatgaatccagccgtccgttcggtcctacaggttctgatccgctgcaaggtacacgtagcgatatgaactggcaggatgttagcggtaaatctgccgccagcgtcgcgcactggcagaaaatcagccagttccgcgcccgccatcccgcaattggcgcgggcaaacaaacgacacttttgctgaagcagggctacggctttgttcgtgagcatggcgacgataaagtgctggtcgtctgggcagggcaacagtaacttttccggcttcccgttcgtcagtacctcgggaagccgccaaccaggataaaatgtcagccctaatcagcgttgcaggataaagcaccgctcactcttcaacagaccgatttgcaccccagcaaatgtagcgttattgttaccttccttgctacagagttcgacagatatcccgctatgacattctccctttttggtgacaaatttacccgccactccggcattacgctgttgatggaagatctgaacgacggtttacgcacgcctggcgcgattatgctcggcggcggtaatccggcgcagatcccggaaatgcaggactacttccagacgctactgaccgacatgctggaaagtggcaaagcgactgatgcactgtgtaactacgacggtccacaggggaaaacggagctactcacactgcttgccggaatgctgcgcgagaagttgggttgggatatcgaaccacagaatattgcactaacaaacggcagccagagcgcgtttttctacttatttaacctgtttgccggacgccgtgccgatggtcgggtcaaaaaagtgctgttcccgcttgcaccggaatacattggctatgctgacgccggactggaagaagatctgtttgtctctgcgcgtccgaatattgaactgctgccggaaggccagtttaaataccacgtcgattttgagcatctgcatattggcgaagaaaccgggatgatttgcgtctcccggccgacgaatccaacaggcaatgtgattactgacgaagagttgctgaagcttgacgcgctggcgaatcaacacggcattccgctggtgattgataacgcttatggcgtcccgttcccgggtatcatcttcagtgaagcgcgcccgctatggaatccgaatatcgtgctgtgcatgagtctttccaagctgggtctacctggctcccgctgcggcattatcatcgccaatgaaaaaatcatcaccgccatcaccaatatgaacggcattatcagcctggcacctggcggtattggtccggcgatgatgtgtgaaatgattaagcgtaacgatctgctgcgcctgtctgaaacagtcatcaaaccgttttactaccagcgtgttcaggaaactatcgccatcattcgccgctatttaccggaaaatcgctgcctgattcataaaccggaaggagccattttcctctggctatggtttaaggatttgcccattacgaccaagcagctctatcagcgcctgaaagcacgcggcgtgctgatggtgccggggcacaacttcttcccagggctggataaaccgtggccgcatacgcatcaatgtatgcgcatgaactacgtaccagagccggagaaaattgaggcgggggtgaagattctggcggaagagatagaaagagcctgggctgaaagtcactaaaaattgcctgatgcgctacgcttatcaggcctacatgatttctgcaatatattgaatttggaagaatttgtaggccggataaggcgtttacgccgcatctggcataaacaaagcgcactgttccggcgttgagaaacgccggaaaacgtttcaaacaggctgctgccgtagccgatgccgctgcactttctcgacatccatgcactgcaacgcctttgtcgggcaggcttcaacacaggccggtcccgtctcccgatgccagcacagatcgcacttaatcgccctcgcctttttgcggctagaaacgacctccatcgcaccaaacgggcaagccagcatacagcttttacagccaatgcaacgtgtttgttcaacgaaaatatgcccatgttcgcggcttatcgcgtcaacagggcagacattcgcgcacggtgcatcttcacactgatgacaggctactgccgtggtccagcagtggtctttaatgacacgaatacgggaaataaactcgtctggactcaacgcagcgcaatcctgattctcatgatggctcactgcgcaagccacttcacaggtacggcaaccgatacatttcgtcgcatccgcaataataaaccggttcatgatcactcctttgcactaaaacagcagagtgccagagagcgcgtccctactgctttgatccaacgaaggaaatgttaaagttttggcacttgtccaaagcgttatgtgatcgcgcccaggtcatccctgacagtaaatcccagttcattagaaatagcctgcgcggtttcacgcagtggtttcaggagatttttctctcccacctgtttcagacgacttgtgctaaggctaatgctcacggcgtacggcacccgcccatgaatatcaaacaccggaacagcaatacaggagacgccgagttcgttttcttctctgtccatcgccgctccgctttcacgaatgtgcgccagttcgtcgaacatcgcgggcagctcggtaatggtattgcgggttaacggctggatctcatgctgatggctttcccagtaactcttcacgtagtccgggtgaccaaacgccatgtagatcttgcccattgcggaacagtagagcggcatatgctggccaatataggcacgggttcgcagcatcccggttgtgggttccagcttataaatcaaaatagcgtgatcgtcttcgcggctggagaagttaatggtttcaccagtggcgatgttcagtgcctcaagatgcggagcggcgatatgaatgatattcaggctagacagcgccttctgcccgacggcaataaatttggtggtcaggcgataactccctgcggcaggcgcggtggtcacatagccgcaggactgtaatccctgcaataagcgatggacggtactcttatttaaaccagccagctcgctaagatgcgccaacggacaaccgtttggatagttgctcaaaatctcaatcagcatcaacccgcgaaacagactctggcttccggctggacgctctttttcctgcgccatctcgttctctttttttcccatcacttctttccccattttgtcgcgtcctgatggtagcgcaaagtgtgccgtagttcacgatctcgacagataatttataaccaattgatttttatgtcttttgaaattcatcaatcagattgccttgttaaaaagtgatcgatatatttgaaatcaagtttcgcatattgaaattttaagccaaaaaagcgatcaaaaaaacaaggaagcctgggatgaaagtgacatttgagcagttaaaagcagcctttaatcgggtcttaattagtcgcggcgttgacagcgaaacggctgacgcctgtgcagagatgttcgcccgcaccaccgaatccggcgtttattctcacggcgttaatcgtttccctcgtttcattcaacaactggaaaacggcgatatcattcctgatgcccaacccaaacgtataaccagcctcggcgcaattgaacagtgggacgcccagcgtagcatcggtaacctgacagcgaaaaagatgatggatcgcgccattgaactggctgccgatcacggtattggtctggtggcactacgtaatgccaaccactggatgcgcggcggcagctacggctggcaggcggcggaaaaaggctatattggcatttgctggaccaactccatcgccgtaatgccgccgtggggcgcaaaagagtgtcgcataggcactaacccgctgatcgtcgccattccttccacgccgatcaccatggtcgatatgagcatgagcatgttctcttacggcatgttagaagttaaccgtctggcaggtcgtcagctcccggtcgatggtggctttgatgatgagggcaatttgaccaaagaacctggcgttatcgagaagaatcgccgcattttgccgatgggctactggaaaggttctggcatgagcattgtgctggatatgatcgctactctcctttccgacggcgcatccgttgccgaagtcacccaggacaacagcgacgaatacggcattagtcaaatttttattgccattgaagtggacaagcttatcgacggtcccacccgcgatgccaagctgcaacgcatcatggattacgttactagtgccgagcgtgctgacgaaaatcaggccattcgcttacccggccatgaatttactaccctgctggccgaaaaccgccgtaacggcatcactgttgatgacagcgtgtgggccaaaatccaggcgttatgaggagataagtcatgatttttggacatatcgcgcagcccaatccgtgccgtttgcccgccgccattgaaaaggcgctcgattttctgcgcgctaccgatttcaacgccctggagccgggcgttgtcgaaatcgacggcaaaaatatttatacgcaaattatcgatttaaccacacgcgaagcggtggtaaaccgtccggaagtgcatcgtcggtatatcgatattcagtttctggcgtggggcgaagagaaaatcggcattgctattgatacgggaaataataaagtcagcgaaagtctattagagcagcgcaatattattttttatcacgacagtgaacatgaaagttttatagaaatgataccgggcagctacgcaattttctttccgcaggatgttcaccgaccaggttgtattatgcaaacagcctctgagatacgaaaaattgtggttaaagtcgcattaacggcgctgaattaatcgaataatcgtctacgccagaacgcctgggtaatgttattgctctaactatattaataattcaggttgctgcacatgcgacttgaattatgacagacatagcctcaaggaatagctatgaaaaaaatactcgaagcaatactggcgattaatctcgccgtactttcctgtattgtatttataaacattattttaagatatggttttcagacaagcattttatctgttgatgaattgagtcgttatttatttgtctggttaacgtttattggcgcgattgtagcttttatggataacgcccacgttcaggtcacctttctggtggagaaactctcccccgcatggcagcgacgagtcgctctggttacccattccttaatcttatttatttgtggcgcactggcctggggcgcaacgctaaaaacaattcaggactggagcgattatagtccgatcctcggtttacccatcggcctgatgtatgccgcttgtctgcccaccagcctcgttatcgcattctttgaactgcgtcatttatatcaactcatcacgcgtagcaattctctaacgagcccaccgcaaggagcttaatcatggctgtgctgatttttctgggctgtctgttgggtggtattgctatcggtttgcctattgcctgggcactgttgttgtgcggggcggcgttaatgttctggctggacatgtttgatgtccagatcatggcacaaacgctggtgaacggagccgatagcttctccctgctggcgattccgttctttgtgctggcgggtgaaatcatgaatgcgggcggcttgagtaaacgcattgttgacctgccgatgaaactggtggggcataaaccaggcgggctgggctacgtcggcgtgctggcagctatgattatggcgagcctttctggttctgccgttgcggataccgccgccgttgccgctctactggtgccgatgatgcgcagcgccaactatccggtcaaccgggcggcggggctgattgcctctggcggcattatcgcgccaattattcccccttccattccgtttattatcttcggcgtttccagcggattatccatcagtaagctgtttatggcgggcattgcccctggcatgatgatgggcgcaacgctgatgcttacctggtggtggcaggccagtcgccttaatttaccccgccagcaaaaagcaacgatgcaggaaatctggcactcttttgtctccggtatctgggcgctgtttcttccagtcatcattattggcgggtttcgctccggcctgtttacccctaccgaagccggggccgttgctgctttctatgcgctgtttgtcgccacagttatttaccgtgaaatgaccttcgccacactttggcatgtactcattggcgcggcgaaaaccaccagtgtggttatgtttctggtggccagcgcacaagtttccgcctggctgattaccattgctgaactgccgatgatggtttctgatttactgcaaccgttggtcgatagtccgcgtctgctgtttatcgtcattatggtggctatcctgattgtcggcatggtcatggatttaacgccgacggtattaattcttaccccggtattaatgcctttagttaaagaggcaggaatcgatccgatttatttcggtgtcatgtttatcattaactgcagtatcggcttaattacaccgcctatcggtaatgtacttaacgttattagtggggtggcaaaactcaaattcgatgatgcagtcagaggcgttttcccttacgtcctggttttatatagtttattagtcgtatttgtttttattcccgatctcatcatcctccctttgaaatggattaattaaaaggaaaatattatgaaattacgctctgtaacctacgcattattcattgctggcctggctgcattcagcacatcttctctggcggcacaatctttacgtttcggttatgaaacaagtcaaaccgacagccaacatattgcggcgaaaaaattcaatgatttattgcaggagagaaccaaaggcgagctgaaattaaaactgttcccggacagcactctcggtaacgcgcaggcgatgatcagcggcgtacgtggcggcaccatcgatatggaaatgtccggcagcaataactttgccgggttaagtccagtgatgaacttgcttgatgtccctttcctgttccgcgataccgctcacgcgcataaaacgctcgacggcaaagtcggtgatgatctgaaagccagtcttgaaggtaaaggactgaaagtactggcctactgggaaaacggctggcgcgatgtcaccaacagccgcgcaccggttaaaacccccgccgacctgaaagggctgaaaatccgcaccaacaatagcccgatgaatatcgccgcattcaaagtctttggcgctaacccgatcccgatgccgtttgccgaagtctataccgggctggaaacccgcactatcgacgctcaggaacacccgatcaacgtcgtctggagtgcaaaatttttcgaagtgcagaagttcctttctctgacgcaccacgcctattccccgcttctggtggtgatcaacaaagcgaagtttgatggcttaagtccggagttccagcaggcgctagttagttctgcacaagaagcgggtaactatcagcgcaaactggttgctgaagatcagcaaaaaatcatcgacggcatgaaagaagcgggcgtggaagtcatcaccgatctcgaccgcaaagcctttagcgacgcactggggaatcaggttcgcgacatgtttgttaaagatgtgccgcagggagctgatctgctgaaagccgtggatgaggtgcaataaaccatgacgcaatactggctggggttagattgtggcggtagctggctgaaagccgggctgtatgaccgcgaaggccgggaggcaggcgtgcagcgcctgccgctgtgcgcattaagcccgcagccaggctgggcagagcgcgatatggcagaactgtggcaatgctgcatggctgtcattcgcgccctgcttactcattctggtgttagcggggaacaaattgtcggtatcggcatctccgcacagggaaagggcttgtttttgctggataaaaacgacaaaccgctcgggaatgctattttgtccagcgaccgccgggcgatggaaatcgttcgtcgctggcaggaagatggcatcccggaaaaactctacccgctgacccgacaaaccttgtggaccgggcatccggtgagcctgttacgctggctgaaagagcacgaaccagaacgctacgcgcaaattggctgcgtgatgatgacgcacgactacctgcgctggtgtttaactggcgtcaaaggctgtgaagagagcaatatttccgagtccaacctctacaacatgagtcttggggaatatgacccgtgcctcaccgactggctggggatcgctgaaatcaatcacgccctgccgcctgttgtcggatctgccgaaatctgcggggagatcaccgctcagacagccgccctgaccggtctgaaagcgggtacgcccgttgttggcggcctgtttgatgtggtttccaccgcactctgcgccgggatcgaagacgaatttaccctcaatgcggtgatggggacctgggcggtgaccagcggcataacccgcggtttacgtgacggtgaagcgcatccgtatgtctatggtcgctacgttaacgatggtgaatttatcgttcacgaagccagccctacctcttccggcaacctcgaatggtttaccgcacagtggggagaaatcagctttgatgagatcaatcaggccgttgccagcttgccgaaggctgggggcgatctctttttcctgccgttcctgtacggcagcaacgccggactcgagatgaccagtggtttctacgggatgcaggccattcacacccgcgcgcacctgttgcaggccatctatgaaggggtggtgttcagccatatgacccacctcaaccgaatgcgcgaacgttttactgatgttcacaccctacgcgtcactggcggcccggcgcactccgatgtctggatgcaaatgctggcggacgtcagcggtctgcgtatcgagctgccgcaggtggaagaaaccggctgctttggtgcggcccttgccgcccgcgtcggcaccggggtttatcacaacttcagcgaagcccaacgtgacttgcgacacccggtgcgcaccctgctgccagatatgaccgcccatcagctttaccaaaaaaaatatcaacgttatcagcatctcattgccgcacttcagggctttcacgcccgcattaaggagcacacattatgagccgaccacttctgcaactggccctcgaccacagtagtcttgaagccgcgcagcgcgacgtgacgctgttaaaagacagcgtcgatatcgtcgaagcgggcaccattctctgtttaaacgaagggcttggcgcggtgaaagccttgcgcgaacagtgcccggacaaaatcatcgttgctgactggaaggtcgccgacgctggtgaaacgctcgcgcaacaggcgtttggcgcaggcgctaactggatgaccatcatctgcgccgcgccgctcgcgacggtagaaaaaggccacgcaatggcacaacgctgcgggggtgaaattcagatagagctgttcggtaactggacgctggacgacgcccgcgactggcatcgtattggcgtgcggcaggccatttatcatcgcggtcgtgatgcacaggccagcgggcaacagtggggcgaagccgatctggcacgcatgaaggcgcttagtgatatcggccttgagctttccattactggcgggattacccctgctgacctgccgctgtttaaagatatccgcgtgaaagcgtttattgccgggcgggcactggcaggcgcggcaaatccggcgcaagtggctggcgatttccatgcgcaaatcgacgctatctggggaggtgcgcgtgcgtaatcatcagttagggatttatgaaaaagcgctggcgaaagatctctcctggccggagcggctggtgctggcaaaaagctgcggttttgattttgtcgaaatgagcgtggatgaaaccgacgaacggctcagtcgtcttgactggagcgccgcacaaaggactagcctggttgccgcgatgatcgaaacaggtgttgggatcccgagcatgtgcctgtccgcacatcgtcgctttccctttggtagccgtgacgaggcagtgcgcgaacgggcgcgggaaatcatgagtaaagcgattcgcctggcgcgcgatctcggcattcgcaccatccagctggcaggttatgacgtctattacgaagaccacgacgaaggcacccggcaacgttttgctgaagggctggcgtgggcagtcgaacaggcggcggcaagtcaagtaatgctggcggtggagattatggataccgcgtttatgaactccatcagcaaatggaaaaaatgggacgagatgctcgccagtccgtggttcaccgtctacccggacgtcggcaacctcagcgcctggggcaatgatgttcccgccgaactgaaactgggcattgaccgtatcgccgcgatccacctgaaagacacccagccagtcaccgggcaaagtcccggacagttccgcgacgtgccgtttggcgaaggctgcgtcgatttcgttggcatcttcaaaacgctgcataaactgaactatcgcggttctttcctgattgagatgtggaccgaaaaagccaaagagccggtgctggagattattcaggcgcggcgttggattgaagcgcgtatgcaggaggctggatttatatgttaacgtaaatgcaggaggctggatttatatgttagagcaactgaaagccgacgtgctggcggcgaatctggcgcttcccgctcaccatctggtgacgttcacctggggcaatgtcagcgcggtagacgaaacgcggcaatggatggtaatcaaaccttccggcgtcgagtacgacgtgatgaccgccgacgatatggtggtggttgagatagccagcggtaaggtggtggaaggcagcaaaaaaccctcttccgatacaccaacgcatctggcgctctaccgtcgctatgccgaaattggcggtattgtgcatacccacagccgccacgccaccatctggagtcaggccgggctggatctccccgcctggggcaccacccacgccgattatttttacggtgccatcccctgcacgcgacagatgaccgcagaggagattaacggcgaatatgaatatcagaccggcgaagtgatcattgaaaccttcgaagaacgtggcaggagtccggcacaaatcccggcggtgctggtgcattctcacggcccgttcgcatggggtaaaaacgccgccgatgccgtgcataacgccgtagtactcgaagaatgcgcctatatgggtctattcagccgccagcttgcgccgcagctccctgcgatgcaaaacgaactgctggataagcactacctgcgtaagcatggggccaatgcctattacgggcagtaatccctcacgccggggcttcatcgccccggcactacgaattgatatgttccttgctgtaacgccgcttccacgctgctggcgttaaaccagtatgtttctgaaaaatctgccggaaatagccaacgtcattaaaccgtattgcatggagcaggccgacaacgtcgagtcactgcataacctgttgctgcccgccgatgcgccatttacgacatttgaaggcaagggattgttcagccataagatcctgattcagacgccaggttcccggtatgaacagagcaatccagagcaacaacctttgtggcattacgacggagcaccagccgcaccgacatccaccggtgaattaaaaacgccagctcaccccggtgacaaaggtaaaactctcattacgatcaatcatcgggctgtcggtaatctcttccggcagctcgctgtatcctgcgctcgccatcaatacgacgtgctctcctatcgggtattttgccgtcaggctgacatagggcacccaggcatcctgcgcggaataacttgccagaccgctacgacgggactcactctcactaatgccatagtaatagtcactgaaattctcgtcataatagagaacgcccagcgcaggtgtcaggctcagacgacctatccgcattttgtggaatacgcttagctcccccacccagccgttgctgttatccagaacgtccgcagctgcagaggctttcacggttccccaacgctcgtggtgataccaggcaacccccgccatagccgtactatcacgcttatcaagctgttgcatggcataatcgtcattatcggtagggtcaaattccagcggcatccaggatgcggtcaggctaagttcatttttttcactttggctcagaataaaacctaacgtggtctgacgaacataaaaagtatcaccttcataactaatcagcggaattgccttcgtattttcattataaccgcgataagggctttcattataagccgcaccagcaccaatggataattcagaagcagttgcgcttgccataaaaggcaacgcaaataacgccacaatattgcgattaattaacatgtccggtattccattttaaaataagataaaaaagagtcggcataataatgcttacaatttctccggtgcaagattcatatttatatagtaatatataaaattatatataattgggctgttgcgatgacaaaattacaacttaagtaccgggagttaaaaattatcagcgtaatcgctgccagtgaaaatatcagccatgccgcgactgtacttggcatcgcacaggccaacgtcagcaaatatcttgctgattttgaaagtaaagtgggtttaaaagtccttgaccgaaccacccggcagctgatgctcacaccttttggcaccgcgctgttaccgtacatcaacgacatgctggacagaaacgagcaacttaataattttattgcagattataagcatgagaaacgtggtcgggtcaccatctacgccccaaccggcataattacctatttatccaaacatgtaatcgataaaattaaagatatcggtgatatcaccttaagcctaaaaacctgcaatcttgagcgtaatgccttttatgaaggcgtcgaatttcctgatgattgtgatgttttaatcagctacgctccaccaaaagatgaaagcctggttgccagttttattacccaatatgccgtaaccgcttatgccagccagcgctatcttgagaaacatcccattagccgtcctgacgaactcgaacatcactcctgtattttgatcgacagcatgatgatcgacgacgcgaatatctggcgcttcaacgtcgccgggagtaaagaggtgcgggattatcgcgtgaagggaaattacgtttgcgacaacacgcaatctgcgctggagctggcacgaaatcacctggggattgtgtttgcgccagacaaaagtgtgcagagcgacctgcaagacggcacgctggtgccctgctttcagcaaccctatgaatggtggctggatctggtggctatcttccgtaaacgggaataccagccctggcgggtccagtatgtgctggatgaaatgctgcgtgaaattcgccaccagcttgctcagagccagcaactgcggcctgaacaagcggcggaaagcgaagattaatgatcgagataaaggtaatgcacccagctggtcatgcgtaatagcactttgcgcatcacgctgacatggctgaaatgatcagagtaaaccgccacctgggcgtaaataccgtctggtaaagcgctcaaatcagtgtgctcatccagttcaatggtcgcgataacgccatcactacccggcgctgtgtttaacgtctgtaaggtgccggtgctctgataagctccgccgggaacggctggactaatggctgccagcttaccgctgaataccttacctggcagagcattaaacaccacttccgcatcgtcgccaggagccagtcgcagcaaggagttctgacggaactgcgccacgatttgtcgtttctgatcgggtataaacaccatcaccggacgtagcggcaggctcgcggcataggtacccggacgaatcagtacctgggtcacataaccatcgctcggcgcacgcactatcgtctgctcaaggttatattttgcttccgcgagctgtgctttcaggctggcgatttgagaatgttcacccaacaccaggctatccagctggctctggatctgtttttgttccgccgcgctactcttcacggaggcttcctgcgccagataattttgccgcgccacatcgatatcgcgttcactaaacgggtttactttcgcctggctgccacgtgcgtaacgctgatactctttagcgaatttatcccgcgtggcctttgcctgctgagtattcgccgccatctcatctaactctgcgcccaacgcccgctgtttatgttctgcggtaacgatatccgccatcagccgatccacccgcgcctgataacgcgtcgggtccagtcgaaatagcacctcaccttttttaatcagcgtatttttcttatccgtcacttcaatcaccacaccagtcacctgtgggacaacaggaatagaaataaccgctttttgcgctttaaaggtatacggatggttatagttcattaacagaattagaccgctgacaataaatattccacccagggccgctgtgggaatggtccatttatttacgggaattttgaagatcttaaacattgcccatgcaaaagccacataggtcaaaataatcagtaaatccataagtattactcggcagaagaggatttgatgtcggcgagctgtttctccagcccggcaatgcgctgttgcagttgcataacggaactatcatggctttgcattccccatccccgctccgggcggtaaagcgtggcccaaatccacaaaaacggccagataacatgtaacgtaaaaagactcacccaaccagcaacatgaatggcgtcggcatgaggatgattacgttttttggcaatcaggtagggaatatcatgtaaaataatgatcccatagaagatcaccagaaatacaaaaataagcactcccagtgcaaaatagtccaggaacatatttccctcaaagaatataaaaaagaacaattaacgcatattatgaaatgccatgatgcagtgcaatttccttatttatataacgacatattgttttttatatactttcttaaatgtgctgtctggtttttcaacaggacgaggtttatcatattgaaatagtggaactattggccaaactaatgaataactccagtaaaacatccacagtacagattaagcgtattaaaccttcaattatctaccgtttattgctgattggcctcggatcaccaatggtgatttacggcctggttcgcccgctcaccatcgaaacgcgagattaaactcctgacaaaacacgccccagaaacgtacttctgttggcgtagtctgggttattgcgcacgtaggtttaaaacgtaaattgtaacaacgtgcgctttgtttatgccggatgcggcgtgtacgccttatccggcctacggtcaggttcccgtaggcatgataagacgcgtaagcgtcgcatcaggcaatgaatacccaatgcgaccagcttcttatatcagaacagccccaacggtttatcgctgtagctcaccagcaggcacttggtttgctggtaatgctccagcatcatcttgtgggtttcgcgaccgataccactttgtttgtagccaccaaacgccgcatgtgccgggtaagcgtgataacagttggtccacacgcgcccagcctgtatgccgcgccccatcttataggccagattaccgttgcggctccagacgcccgcgcccaggccatattgcgtatcgttcgccagctccagcgcttcttccatcgttttgaaggtggtcaccgccagcaccgggccaaaaatctcctcctggaacacccgcatattgttctgaccaaacagaatcgtcggttcgaggtagtagccgtctttcagttcaccttccagcagcttgcgccgcccgcctgtgagcacgtcagcgccctcttttttaccgatatcaatgtagttgaggatggtttccagttgcccgtgagaaacctgcgcgcccatttgcgtcacgctgtcgagcgggttaccgctacgaatgctttcgacacggcggatggcgcgttccataaagcgttcgtagatagattcctgcactaaagcacgactcggacaggtgcaaacttcgccctggttaaaggcaaacagtgcaaagccttccagcgctttatcgaaaaaggcatcttcttcatccatcacatcagcaaagaagatatttgggctcttaccgcccaactccagcgtcaccggaataatgttttgcgttgcgtattgcataatttgttggcccacttccgtactgccggtaaacgccactttggcgatgcgtttgctggtcgccagatattcgccaattaccccacctgcgccattgaccacgttcaccacgcccggcggcagtaaatcaccgacaatttccattagcagcagtacagaaagcggggtaagacgtgcgggtttcagcaccacacagttgcccgccgccagcgcgggagccattttccagctcgccatcagcagcgggaagttccacgggataatctgccccaccacgcctaacggttcatggaaatgataggccacggtttcgctatcaacttcactgatcccaccttcctgcgcccgaatacagctggcgaaatagcggaaatggtcaatcgccagcggtacatccgcagcactggtttcgcgaatgggtttgccgttatcccaggtttcagctgtcgctaacagctcgaggttttgttccattcgatcggcaatcttaaacagaatcgccgcacgatcctgcacgctggtgtgcgcccatttatctttcactttgtgcgcagcatccagcgccagatcgatgtctcgtttgccgctagacgccacttcgcacagcagctgcccggtcaccggcgtcagattctggtaatactcgccgtcggcaggggctacccattcgccgccaataaagttgtcatagcgggcttttaacttgagggggaaaccatactcgccgggcttaatctgtgcactagggggattattggtcatgatcgtctccttgcggtgtgaggtataacaagggtagacgtgactggcgaaatcttcgccagtcggtaacagctttacgacagctatcacgaatttacgggcaagggttacagagatagttgaaaaagcggctaacaatttgccagccgttgtggaaatgatgattacatcgctgcgcgataaatcgccacaatttcttcgtgagttgcctggatcgggttagtaaagccacaggcatctttcagggcattagtcgccaataccgcgaaatcttcttctttcacgttcaggtcgcgtaggcctgccgggatatccactttcttcgccagttcacggatggcgttaatgcaggcttcagcaccttccgcgtcgtttttacctgtcacgttcacgcccattgcagcggcacagtcacgcagacgtgcagcggcgactttgctgttgaatacctgaacgtgcggcagcaaaacggcgttacatacaccgtgtggcaggttgtagaaaccgcccagctggtgcgccatcgcatgaacataacccagagaagcattattgaacgccataccggcgaggaactgggcataagccattgcttcacgcgctttcgcattactgccatcttcaacggctaacggcaggttttcggcaatcatggtcacggctttcagtgcacaagcgtcagtgatcggcgtggcggcaatagaaacatatgcttcgatagcgtgcgttaaggcatccatacccgttgcggcggtcagactcttcggcataccaatcatcagagaggagtcattgacagaaagcagcggagtgacatgtttatcaacaatcgccattttgatatgacgcgcttcgtcagtgatgatgcagaaacgggtcatttcagaggccgtacccgccgtggtattgatggcgatcatcggcagctgcggttttgcagagcggtcaacgccttcgtaatcgcgaatatcgccgccattggctgccaccagcgcaataccttttgcgcagtcgtgtggagaaccaccgcctaaggagatcacgctatcgcaattattctctttaagtaatttcaaacctgcggcgacgttttccgtggtggggttaggttgggtgccatcataaataacgctaaaaatattgcgttcttccagtgctttttgcacatcgcccgccatacctaatttcgttaacatattgtcagtgacaattaaggtacgggtaaatccataatctgccatcatattcattgcatcagtcaaactatcagcgccgatgacattcacagaaggaataaagaacgtactagctgccataacacactcctgaaagtgtaaaaaagggcgggcagcttactgaggattttcattcgaaaatatgatcagtattattgattatcaaaattaatctaataaaaagcacattgtattcattaaacaatgtgctttttttaaattcataagaattttgtattaatttattttaaaacttaattaatcatttccttatttttccggaaataataatgcgtcgcgcaataaatgatcatttccacgacgacgcgtaaagccaatgcggtcaaaatattccagaatctgaattgccagctttcggcctacgcctaagcgatcgcggaaatccgccgcgcaggtactaccacactcctgatcgagatcgcggatcatattggcaaactcgacaatccgatcgttacggtaataacgatctttaacgatcgcggtaattattccttgctgcgccgcctggcgtagagtcaggcgcattgcctgctcgtcggttcccgtctcttttgccaggtcacgcacccaccacggttcgtcaccaaacagtggctctgctttttgccagatggcctgctgctcttcgctgaagcccgctttgtgatctggcagatgcagccagccgtgatggctgtggatgtcgccgctttcgcgcatcttttcaatcagcaacagtaccagcgcttcatcttccattggcaacgccatacgtcgcagacgttcgcgcccagggccaggttcatcgcgatgttgctcatgataagtcgctaatgtgtcgagaattttccgctgccagcgggcggcaaccggcgcattcaacaagctataaccagcctgaatataaccaggctgttgcagcaattcgcgcatcccttcgccgttgagctggcgcgcccaggcgaaatccgcaaggttaaccgcgccgcgttccagatgaacagataacgcatcggcatcgctctgcgcccgtgcaagagacgccagccattgcagatattccggcttacgtttaccgcgacgcggcgggttaagcatcacgacgcgcgctccggccagcgtgttgcgggcagagatatcgcgcaataccaggcggtcgttatctgccagccataacggggtgtcgaagaccagttcagcaaggttatcttccagcagactaacgcgtcccgtgacgtggctggcggcgtggtgaatatgcagcggctgccactgggtcagcggtgtatgggtttgaagctcgacaatcacccgtgtgaacggctctggcggcacatcggcaagcagccagtcgccacggttaatctgctctttttccgcatcacccgcgatgttaagcgcgatacgctgcccggcattggcggtttctgttggctggttttgcgcatgcagcgcacgtacacgcatcggtttatttacaccagtcagccagagactatcgcctaccttcacttccccgcttaacgccgtaccggtgacgaccagcccggcaccttttacggtaaatgcgcggtcaatcgcgaggcggaaactatgttggctggcgtgctcgcgttccggcaactgaagcagatgctcgcgcagggcatccattccccgaccttcggttgctgcggtgataaacagttttgcctcagcaaaaccgtattcccgcagaacctcctttacctggcgttcaacctcatcaacacgcgcttcgtccacgcgatcggctttggtcagcgccactgtcagcatcgggttaccggtcagctgcaaaatcgccagatgctcacgggtctgtgccatcacgccgtcatcgcacgccaccaccaacagcgcgtgatcgataccaccaacgcccgccagcatgttggaaagaaacttttcatgaccgggaacgtcgataaaaccaggcacgcgaccatccggctgcggccagtaggcatagccgagatcgatggtcatgccgcgctttttttcttccggcagacggtcagcatttacgccagtaatcgcctgcaataaggttgttttgccgtggtcaacgtgtccggcagtcgcaataatcatttcaacaacatctccaaaaaccgttgctcatcttcaaggcagcgtaaatccagccacaatcgtccgtcataaatacgaccaatcaccggcactggcaattcacgccagcgggcggctaaactctcaaggtggctaccgcgtccatcatggggtgtaaacgttaatgccgcgctcggcaggcgatcaaccggcaggctaccactgccaatctggctaagacatggcataacctgtaccgcaaactccgcgccgtaatgtgcggcaaggggggcctgtaaacgttgtgcctggatttgaatgacctctgcgctgcgggtaagcaggcgcagggtcggtaatttttcactcagagcttcagggtgtaaataaagacgcaacgtggcttccagcgccgcgagggtcattttatccgcgcgtaatgcacgcttcagcgggtggctttgcaggcgggcgatcatctcttttttaccaacaataattcctgcctgcggcccgcctaacaacttgtcgccggagaaactcaccagactgacgcccgccgcaatcaactcctgcggcattggctctttcggcaaaccgtactggctaagatcgaccaggctgccactgcctaaatcagtcactacgggaacatccagctctttgccgagcgccaccagttccgcttcatctatcgctttggtgaacccctgaatgctgtagttactggtatgtactttcatcaacagtgcggtattttcattcaccgcctgacgataatcattcgcgtgcgtgcggttggtggtccctacttcgtgtagggtgcagcctgcctgacgcataacatcgggaatacgaaacgcgccgccaatctccaccagttcgccgcgagataccaccacctcttttccgctggcagtggccgccaacatcaataacaccgccgccgcattgttattgacgatacaggcatcttccgcccccgtaatacggcacagcagctgcgccagcgcccgatcgcgatgtccgcgtccggcgtcgtccagatcatactcgagggtcactgggctacgcatagcctgcgcaacggcttccaccgcggcttccgcctgtaaagctcgcccaaggttggtatgcagcacggttcccgtcaggttgatcaccggacgcagcgcgctctgcgcttctttcgtcaaccgggcatcgacttcttgcgcccagttttcacaccacgcaggcagcgtctggctgccacgaatcacttctcgcgcttcgtcgagcatctgacgcaacaattccaccacgcgggtgtgaccataagtatcacgcaaagaaaggaaggagctatcgcgcaataagcgatcaatagccggaagttgactatagagggaacgcgtttcggttgtcataggaaacctggctgatcaaggccctctcacacggagaagggcgtttaacataaccacggattgtaacgtgagatgggtcaggaggacatatcgcgcatcaagcctttggcggttcggtgcgagcaaaactttcgcggctaaacaggttttcgaccagtttgactaagtgtgggcggtcgacacaccaacctggcgcaacgcggcggaaattgagatatccgacggcacaggcaatggcgatagtcgccagattgaccgtatcggttttgagtgtgccatcgaccagatatccttccagcacatccagactgcggttgattttctcccgctggcgtaacaattcatcttcagactgctgcgccgctggacgcgcctgttcacgcacgcttaccagcccggcatccataatgccatccgccagtgcctcaattttgcgcacccgcaagctctccagcggatcgcgcggcaacatcgccggagcgacattcattaattcaatatattcagcgatgatcgggctatcaaaccagcattcgccctcttcggtcaccagcaccggcacttttcctaacgggttaaattgcgccacgccgttgtccgcgttatagggcagttcattaataaattcgaaagttatgcccttttctaacaacagaatagaaagtttgcgtacaaacgggctggtgtagctaccgacgagtttcatgccgagtcctttgtgcgaggaaaaatatcagtatggctcaatgatccaaataaagataatgcatccagctggtcattcttagcagcactttccgcatcacgctaacatggctgaaatggtcggagtaaaccgccacctgggcgtagatgccgtcgggtaaggcatcgatatcatcgttagggtccagttcaatggttcccagcacaccgtccgtgccgggcacgaccgttaaactttgcaataccccctgcgcctgataagaaccgcctggcacgacaggtaaaatactagtcagtttgccgtgaaacacctgcccaggtagcgcgttaaacaccacttccgcatcatcgccaggtttcagacgtaacaggctgttttgccgaaattgggcgacaatttgccgtttttgctcggggatgaagaccatcaccggacgcagcggcaaggcagctgcgtatgtacctgggcggatcagtacctgagtaacgtagccattgctcggcgcgcgaatgacagtctgctcaaggttatattttgcttcagtaagttgcgctcttaagctcacaatctggctttgctcgccgttaaccatactgtcgagctggctctggatctgcgcctgctccgccacgctgcctttcaccagcgcatcctgcgcgaggaaattttgccgcgcatcgtcgatgtcacgttcgctgaacggattcaccgccgcctggctgcctttcaagtaacgttgataatttttaaacagacggtcgcgctccgcactaacctgggtggtgttggcctgcgcttcagtgagctgcgcacgcagcgtctttatattatgcgtcgccgtcatcaggtcagcctgaagtctgtcaactcgcgcctggtaacgaaccgggtcgagcttaaaaagcacctcgcccttttgaataagctgattattcttgtcagtgacttcagtaacaattcccgtcacctgtggcgtgatagggatcgctatcactgccttttgcgcggtaaaagtgtaagggtggttgtagttcatcaacaaaatcaaaccactcaccagaaacacgcctcccagcgccgccgtcgccagcgtccactgatttaccggaatgcggaagattttaaagaccgcccacgccagcgccacgtaagttaaaacaatcaatagatccataattagatctccgggaacgtggaatagtcagtctttttctcggcggcgagttgatgctccaaccgggaaattcggtcagaaagtgcggcgatttccgggtcagtcgctttctcctggctcgcaacatgactctgcataccccagccacgctccggttgatagagcgtcgcccagatccacagaaacggccagataacatgcagagtaaacaggctcacccagcccgccgtatgaatagcgtcggcatggggatggttgcgctttttggcaatcagataagggatgtcatgtatcgcgatgattccataaaaaatcaccagaaagacgaagatcagcactcccaacgcgaaatagtttagaaacatatctgcctcggattcacgtttatcagtgttgtttttgggctggcagccagaagggagtcaggctgatattttgacaataatccgggttcgcgattctcgccataacaccaaagaataatttttagaggtgatgagttgcttagttacataacgattgtatgacgaaggcataacatgctgtagatcacatcaggtgaacgccgtaagaaaatatcttgtgattcagatcacaaagattcaacaaaccatcaaaacaaaaatgtgacactactcacatttaaatgccatttttagcgaaaatcgccgccttgttgcttttttacacaagcgttttgtgatgaacgtcacgtcaattacctctctaccccctatatttatgtgattgatatcacacaaaaggccgtcgactggacagttaaccgattcagtgccagatttcgcagtatctacaaggtccggctacctctgccgccacattaacaaaaaacctcgggcttccagcctgcgcgacagcaaacataagaaggggtgtttttatgagttccgatattaagatcaaagtgcaaagctttggtcgtttcctcagcaacatggtgatgccaaatatcggcgcgtttatcgcgtggggtatcatcaccgcgttatttattccaacagggtggttaccgaacgagacgctggcgaagctggtcgggccgatgatcacttatctcctgccgctgctgatcggttataccggtggtaagctggtaggcggcgaacgtggcggcgtagtcggtgccatcaccaccatgggcgttatcgtcggcgcagacatgccgatgttcctcggttctatgattgcaggtccgctgggcggctggtgcattaagcacttcgaccgctgggtagacggtaagatcaaatccggttttgagatgctggtgaataacttctccgcaggcatcatcgggatgatcctcgctattctggcattcctcggcattggcccgattgttgaagccctgtccaaaatgctggctgcgggcgttaacttcatggttgtccatgacatgctgccgctggcgtctatctttgttgaaccggcgaaaatcctgttcctcaacaacgccattaaccacggtatcttcagcccgctgggtattcagcagtcccatgaactgggtaaaagtatcttcttcctgattgaagctaacccaggtccaggtatgggcgtgctgctggcgtacatgttctttggtcgtggtagcgctaaacagtctgcgggcggtgcggcaatcatccacttcctggggggtatccacgaaatctacttcccgtatgtgctgatgaatccgcgtctgatcctcgcagtcatcctcggcggtatgactggcgtgttcacgctgactatcctgggcggtggtctggtttctccggcatctccgggttctatccttgctgtactggcgatgacaccaaaaggtgcttacttcgctaacatcgcgggtgtgtgtgcggcgatggctgtctccttcgttgtctctgctattttgctgaaaaccagcaaagtgaaagaagaagatgatattgaagcagcaactcgtcgtatgcaggacatgaaagctgagtctaaaggcgcatctccgctgtctgctggcgatgtgactaacgacctgagccacgtacgtaaaatcatcgttgcctgtgacgccggtatgggttccagtgcgatgggcgcaggcgttctgcgtaagaaaattcaggatgcaggtctgagccagatttctgttactaacagcgcgatcaacaacctgccgccagatgtggacctcgtcatcactcaccgtgacctgaccgaacgcgctatgcgccaggttccgcaggcacagcatattagcctgaccaacttcctcgacagcggcctgtacaccagcctgaccgaacgtctggttgctgcccaacgccacacggcaaacgaagagaaagtaaaagacagcctgaaagacagctttgacgattccagtgctaacctgttcaagctaggcgcggagaacatcttcctcggtcgcaaagcggcaaccaaagaagaagcgattcgttttgctggcgagcagctggtgaaaggcggttacgttgagccggaatacgttcaggcgatgctggatcgtgaaaaactgaccccgacttatctgggtgagtctatcgcggtgccacacggtacggttgaagcgaaagatcgcgtactgaaaacgggcgtcgtgttctgccagtacccggaaggcgtgcgcttcggtgaagaagaagatgacattgcccgtctggtgattggtattgctgcccgtaacaacgagcacattcaggttatcaccagcctgaccaatgcactggatgatgagtccgtcatcgagcgtctggcacacaccaccagcgtggatgaagtgctggaactgctggcaggtcgtaagtaatccaatcccaccctctccacatggagaaggtggggttaattgcctgatgcgctacgcttatcaggcctacaggatgcatcacaatttgttgaatttgcacgttcttgtaggccggataaggcgcttacgccgcatccggcgctgcccctctcctcacggagagggtttgggtgagggaaaagcctcaccccagccctctcgggtaaaaacattgatgaaggttaatactatgaaagcattacattttggcgcaggtaatatcggtcgtggctttatcggtaaactgctggcagacgcgggtatccaactgacgtttgccgatgtcaatcaggtggtacttgatgccctgaatgcccgtcatagctatcaggtacatgtggttggtgaaaccgagcaggtagataccgtttccggcgtcaatgctgtcagcagcattggtgatgatgtcgttgatctgattgctcaggttgatttagtcactaccgccgttggcccggttgtgctggaacgtattgctccggcaatcgccaaagggcaggtgaaacgtaaagaacaaggtaatgaatccccgctgaacatcatcgcctgtgaaaacatggtacgcggtaccacgcagctgaaaggccatgtgatgaacgccctgccggaagacgccaaagcgtgggtagaagaacacgttggctttgtcgattccgccgttgaccgcatcgtaccgcctagcgctagcgcaactaacgatccgctggaagtgacggtagaaaccttcagcgaatggattgtcgataaaacgcagttcaaaggcgcactgccgaacatcccaggcatggagttaaccgacaacctgatggcatttgtcgaacgtaaactcttcaccctgaacacgggtcatgctataaccgcgtacctcggaaaactggccggtcatcagaccattcgtgacgcgattctcgacgagaaaatccgcgcggtggtaaaaggtgcgatggaagaaagtggtgcagtattgatcaagcgctacggctttgacgctgacaagcatgcggcgtacatccagaaaattctcggccgttttgagaacccgtatctgaaagatgatgtagagcgcgtaggccgtcagccactgcgtaaactgagtgctggtgaccgtctgatcaagccactgctcggtacgctggaatatggtctgccacataaaaacctgattgaaggtattgccgctgcaatgcacttccgcagtgaagatgatccgcaggctcaggaactggcagcactgatcgctgacaaaggtccgcaggcggcgctggcacagatttccggtcttgatgccaacagcgaggttgtatccgaggcggtaaccgcttataaagcaatgcaataatggtggaccaggcgcaggacaccctgcgcccgaataacagattgagtgatatgcaggcaacaatggaacaaacccaggcctttgaaaaccgtgtgcttgagcgtctgaatgctggcaaaaccgtgcgaagctttctgatcaccgccgtcgagctcctgaccgaggcggtaaatcttctggtgcttcaggtattccgcaaagacgattacgcggtgaagtatgctgtagaaccgttactcgacggcgatggtccgctgggcgatctttctgtgcgtttaaaactcatttacgggttgggcgtcattaaccgccaggaatacgaagatgcggaactgctgatggcattgcgtgaagagctaaatcacgacggcaacgagtacgcctttaccgacgacgaaatccttggaccctttggtgaactgcactgcgtggcggcgttaccaccgccgccacagtttgaaccagcagactccagtttgtatgcaatgcaaattcagcgctatcaacaggctgtgcgaagtacaatggtccttagtctgactgagctgatttccaaaatcagcttaaaaaaagcctttcaaaagtaagcaacgtctgcttactgcccctctacctgcttcggccgataaagccgacgataatactccagacgttgtagatataacggcacgctttcatcgggtattccggacggaatcgcgttacggggaggaagttttttcagatactcccggaacgcctggctacttgccatgaaatctacggctttatcgataagaagcggaacgttttcacctaatttgcccatgatgatatctccgtattaccccgcgccgggaatgcgcggccgccaattttagtttaggttcccggtaaagatgacattaaggaaaacgtgctgaatcctcaataatcatccgctgctgtttattatcttttttctatagatttcttaattaatcaacgaattgcgcagtttttgagcatgttaatgattacgttacagaactattacaatgtcattagttgtgaacaaagcacctggtcgcgcatactaggggctataaatttatctttatcagaagccatcacatgaaagaagtcgaaaaaaacgaaatcaaacgcctcagcgatcgcctggacgccatccgccaccagcaggccgatcttagcctggttgaagccgcagacaaatatgccgagctggaaaaagagaaagccacgctggaagcagaaattgctcgcctgcgtgaagttcatagccaaaaactgagtaaagaagcacagaagctgatgaagatgccattccagcgcgcaattaccaaaaaagagcaggctgatatgggcaagctgaagaaaagtgttcgcggactggtcgttgtgcacccaatgaccgcactgggccgcgaaatgggcctgcaggagatgactgggtttagtaagaccgcgttttaagaacacagtatctacagggtgattctgcacattcctataggccgagtaaggtgttcacgccgcatccggcaagataaggcgctctggatcaacaacctaagggcaattctctgatgaggattgcccttttctttaccagacatctccccccacaagaattggccctaccaattcttcgcttatctgacctctggttcacaatttcccaattaaaactcacatcaatgttgccaatacataacatttagttaaccattcattgtcattatccctacacaacacaattggcagtgccacttttacacaacgtgtgacaaggagatgagcaacagactcattacacgatgtgcgtggactccaggagacctgcaatgaatctctggcaacaaaactacgatcccgccgggaatatctggctttccagtctgatagcaagccttcccatcctgtttttcttctttgcgctgattaagctcaaactgaaaggatacgtcgccgccagctggacggtggcaatcgcccttgccgtggctttgctgttctataaaatgccggtcgctaacgcgctggccagcgtggtttatggtttcttctacgggttgtggcccatcgcgtggatcattattgcagcggtgttcgtctataagatcagcgtgaaaaccgggcagtttgacatcattcgcagctctattcttagcataacccctgaccagcgtctgcaaatgctgatcgtcggtttctgtttcggcgcgttccttgaaggagccgcaggctttggcgcaccggtagcaattaccgccgcattgctggtcggcctgggttttaaaccgctgtacgccgccgggctgtgcctgattgttaacaccgcgccagtggcatttggtgcgatgggcattccaatcctggttgccggacaggtaacaggtatcgacagctttgagattggtcagatggtggggcggcagctaccgtttatgaccattatcgtgctgttctggatcatggcgattatggacggctggcgcggtatcaaagagacgtggcctgcggtcgtggttgcgggcggcagctttgccatcgctcagtaccttagctctaacttcattgggccggagctgccggacattatctctagcctggtaagtctgctctgcctgacgctgttcctcaaacgctggcagccagtgcgtgtattccgttttggtgatttgggggcgagtcaggttgatatgacgctggcccacaccggttacactgcgggtcaggtgttacgtgcctggacaccgttcctgttcctgacagctaccgtaacactgtggagtatcccgccgtttaaagccctgttcgcaagcggtggcgcgctgtatgagtgggtgatcaatattccggtgccgtacctcgataaactggttgcccgtatgccgccagtggtcagcgaggctacagcctatgccgccgtgtttaagtttgactggttctctgccaccggcaccgccattctgtttgctgcactgctcagcattgtctggctgaagatgaaaccgtctgacgctatcagcaccttcggcagcacgctgaaagaactggctctgcccatctactccatcggtatggtgctggcattcgcctttattagcaactattccggactgagtagtacactggcgctggcactggcgcacaccggtcatgcattcaccttcttcagcccgttcctcggctggctgggggtattcctgaccgggagcgataccagttctaacgccctgttcgccgcgctgcaagccaccgcagcacaacaaattggcgtctctgatctgttgctggttgccgccaataccaccggtggcgtcaccggtaagatgatctccccgcaatctatcgctatcgcctgtgcggcggtaggcctggtgggcaaagagtctgatttgttccgctttactgtcaaacacagcctgatcttcacctgtatagtgggcgtgatcaccacgcttcaggcttatgtcttaacgtggatgattccttaatgattgttttacccagacgcctgagtgacgaggttgccgatcgtgtgcgggcgctgattgatgaaaaaaacctggaagcgggcatgaagttgcccgctgagcgccaactggcgatgcaactcggcgtaagtcgtaatagtctgcgcgaggcgctggcaaaactggtgagtgaaggcgtgctgctcagtcgacgcggcggcgggacgtttattcgctggcgtcatgacacatggagcgagcaaaacatcgtccagccgctaaaaacactgatggccgatgatccggattacagtttcgatattctggaagcccgctacgccattgaagccagcaccgcatggcatgcggcaatgcgcgccacacctggcgacaaagaaaagattcagctttgctttgaagcaacgctaagtgaagacccggatatcgccagtcaagcggacgttcgttttcatctggcgattgccgaagccagtcataacatcgtgctgctgcaaaccatgcgcggtttcttcgatgtcctgcaatccagtgtgaagcatagccgtcagcggatgtatctggtgccaccggtttttagtcaactgaccgaacaacatcaggctgtcattgacgccatttttgccggtgatgctgacggggcgcgtaaagcaatgatggcgcaccttagttttgttcacaccaccatgaaacgattcgatgaagatcaggctcgccacgcacggattacccgcctgcccggtgagcataatgagcatagcagggagaaaaacgcatgattatttccgcagccagcgattatcgcgccgcagcgcaacgcattctgccgccgttcctgttccactatatggatggtggtgcatattctgaatacacgctgcgccgcaacgtggaagatttgagtgaagtggcgctgcgccagcgtattctgaaaaacatgtccgacttaagcctggaaacgacgctgtttaatgagaaattgagcatgccggtggcactggctccggtgggtttgtgtggcatgtatgcgcgtcgtggcgaagttcaggcagccaaagcggcggacgcgcatggtattccgtttactctcagcacggtttccgtttgcccgattgaagaagtcgcgccagccatcaagcgcccaatgtggttccagctttatgtactgcgcgatcgcggctttatgcgtaacgcgctggagcgagcaaaagcagcgggttgtagcacgctggttttcaccgtggatatgccgacaccgggcgcacgctaccgtgatgcgcatagtggtatgagcggcccgaacgcggcaatgcgccgctacttgcaagcggtgacacatccgcaatgggcgtgggatgtgggcctgaacggtcgtccacatgatttaggtaatatcagtgcttatctcggcaaaccgaccggactggaagattacatcggctggctggggaataacttcgatccgtccatcagttggaaagaccttgaatggatccgcgatttctgggatggcccgatggtgatcaaagggatcctcgatccggaagatgcgcgcgatgcagtacgttttggtgctgatggaattgtggtttctaaccacggtggccgccagctggacggtgtactctcttccgcccgtgcactgcctgctattgcagatgcggtgaaaggtgatatagccattctggcggatagcggaattcgtaacgggcttgatgtcgtgcgtatgattgcgctcggtgccgacaccgtactgctgggtcgtgctttcttgtatgcgctggcaacagcgggccaggcgggtgtagctaacctgctaaatctgatcgaaaaagagatgaaagtggcgatgacgctgactggcgcgaaaagcatcagcgaaattacgcaagatagcctggtgcaggggctgggtaaagagttgcctgcggcactggctcccatggcgaaagggaatgcggcataatcgtttgcgccccctcaccctaaccctctccctcagggagaggggaccgttcggcgctgtatgtactccctcactctgaaacgacaccgcactctttttttctccctcgcccctccggggagagggccggggtgaggggaaaaggccgcactgctcaccaattttctgctatcctgcccccgcactaagggggcagtatgctaaacatcgtactttacgaaccagaaattccgccaaatactggcaacatcatccgtctttgcgctaataccggctttcgtctgcatatcatcgaaccgatgggatttgcctgggacgataagcgcctgcgccgcgcggggctggactatcacgagtttaccgccgttacgcgtcatcatgactatcgcgcgttcctcgaagcagaaaatccccagcgcctgttcgccctcaccacgaaaggtacacctgctcacagcgccgtaagctatcaggatggcgattatctgatgttcggcccggaaacacgcggcctgccagcgagcattcttgatgccctgcccgctgaacaaaaaattcgcattccgatggtgccggacagccgcagcatgaatctgtccaatgcggtgagcgtagtggtgtatgaagcctggcggcagttggggtatccgggagcggtattgagagattaattactgtaggccggatagatgattacatcgcatccggcacgatcacaggacattagatcccatccccatactcaaatgtatggttaataccgttgaaatgctggtccatatccatacttggcttatcgctgtctggtttaccgacaatacgagccggaacgccagcggcggtggtatgcggcggcaccggttgcagcaccacggaacctgcgccaatcttcgcgccgcgcccaacttcaatattgccgaggattttcgcgcccgcgccaatcatcacaccttcacgaattttcgggtgacggtcaccaccagatttacccgtaccgccaagcgtcacagattgcagaatgcttacgtcgttttcaatcaccgccgtttcaccaacgacgatgcctgtcgcgtggtcaagcatgataccgcgaccaatttttgctgccgggtgaatatcgacctggaacgtcacagaaacctggttttgcagaaagattgccagtgcgcgacgcccctgattccacaaccagtgaccgatgcgataggcctgcaaggcatgaaaacccttcaggtataacaacggggtactgtatttatcgactgccgggtcgcgggtacgcaccgcctgaatatcacaggccgcagaggcgatcatttccgggtcagcggcgtaggcttcttccaccacttcacggatagcaatagcaggcataattgggctactcagcttgttcgccagcatgtagctcagtgcactgccaaggttttcgtgcttgagtagcgtcgcgtggtaaaaactggccagcattggctcacagtccgccagcgttctggcttcggctttaatattgttccagacaatttccagttcttcacagctcattgcttactccacacgatgagataatgaccggcccgttctgcgcgggccgggtcatagcggtaacaaaggttccctggggttagtggctgctgcgctcgtccttgcgtgcacgacctagtaaagtcaatgctgcctcgcgcgcgttttttccgcaatataatacttgataaatttcctcggttattggcatttcaacgccgaagcgatgcgccagttcgcggacttctttcgtattgcggtagccttccaccacctgaccaatcttctcctgcgcgctttgtacatccatgccctgaccgagcatcatgccaaaacggcggttacggctctggttgtcggtacaggtaagcaccagatcgccaagccccgccatgcccataaaggtggcagggtcggcacccagcgccgcaccaagacggctcatttcagccagcccacgggtgatcagcgccgtacgcgcattcgcaccaaaaccgataccgtcggacatccccgcaccaatggcaataacgtttttcaccgcgccgccaagctgcacgccaatgaaatccggattgctgtaaacgcggaaacttttgccgcagtgcagcagctgctggagatcatcggcaaaggtctgatcggtgctggccaggctaatagctgtcggtaaacctgccgccagttctttcgcaaacgttgggccagagataaccgccagcggaatttgatcgcctaaggcctcacgcgccacgtcctgtaacagacgtccggtttccgcttccagccctttggtcgcccacaccagacgcgcatcaggacgcatcagtggtttaatctggcgcagcacttcaccaaagacatggctgggtacgacgacgagaatattacggctggctgccagcgcagtggcgagatcgctttcaagatggagcgtatcgggaaaaggcacatcggggagaaacgcggcgttacagcggtcgcgttcaagcgttgcgatatgttcagggtcatggccccagaggacaacctcgtggccatttcttgccagggtgatggcaagagcggtgccgtagctgccggcaccgatcacagtcatactagcattacgttggttcatcaggcatcctgatgttcttcagtaccttcgccagcctgctgctgcaaatagttcatgaacagcgcatcgaagttaaccggcgcaaggttcagttgcgggaatgtaccgcgggataccatgctggtgatgcactcacgagcatacgggaacagaatgttcgggcagtatgctcccaggcaatgcgccatctgggtgccttcgatacccgcgatggagaaaataccgccctgctgaacttcacacaggaacgcggtttcttcgcccaaagaggccgttacggtaacacgcagtaccacttcgtatacgtcatctgccagttgggaagatgccgtatccagatcaagtttaacttctggttgccaatctttctggaaaacgtgcggcgcgttcggcgcttcgaaagagatatccttggtataaatacgttggatctggaaagtcatttcagtgttgttttgttcactcatgtgtagaaaacccttaagtgttgtccttaaatactgcgcaatgtaatgccaacgttcacacgttatttcagcaggggatccagtccaccacgtgcatccaatgcatacaagtcatcacagccgccaatgtgctgtgcgtcaataaaaatctggggaaccgtggtgcgaccgctgcgtttgatcatctcttcacgcttggcggcgttgccatcgatcggcagctcctggaaactcacgcccttgctgctcagcagtgcttttgcacgatggcaatacgggcaggtttctttggtatagatttcaacattggccataaattagctcctgtttttttaccctgaaatttcatgttgcagggcggcagcaaaatggagtgtccccagaagcttataacaataagtcgctgggggcctaattgcagctaacggcctgcatcatgaaagacgacaggtaaattatttgccgcgcaccaaaggcaagttttcgccagcccagccagcgacgccttctttcagcacgaatacttgcgcaaaaccagctttcgtcagtgcgtttgcaggctcctggcactgcatgccagaaccgtctaccacgataaccggtttgtctttgtgcttctcaagctcaccaacattgttggctttgatttcgctcggcaacagattaatagaacctgcgatatggcctttacggaagtcatcacgctgacgtaaatccacaaccacagcgtcttctttgttgatcagacgcgtagcttcaccacgagtaatcaccttcactttgctggtcaggctcttaaacgtagtcacaagaaccgccaccagtaacgcgatccaggcgatactcagtatgggatgacggccaacaaattgcataatttcttgcatggggggtaacaactcccgacgtagtgattaaaaaaaccaggaaaggagtatacctgcgcggtgcggcaaatacagccagcgcgttaactggaatgcaattttgcggggcgcgacgaaaaaaaagcgtaaatctggcatcggcttgccgcgagcggtcgtatattttgatcttcagaggctattttatcgattcagctgtagtaaaattacgcaaattttgactcttgagtatgaggttgtcgcaatgttggtttctaaaaaacctatggtactggtgattctggatggctatggctatcgcgaagaacagcaggataacgccatttttagtgctaaaaccccggtaatggatgcactgtgggccaatcgtccgcataccctaatcgacgcttccggtctggaagtcggtctgcctgaccgtcagatgggtaactccgaagtaggccacgttaacctgggtgccggccgcatcgtgtatcaggacctgactcgtctggacgttgaaatcaaagatcgcgctttctttgctaatccggtgctgactggcgcggtagataaagcgaaaaacgcaggcaaagcggtacacattatgggtctgctctccgcaggcggcgtacacagccacgaagatcacatcatggcgatggtagaactggcagctgaacgcggcgcagaaaaaatctacctgcacgcattccttgacggtcgcgacactccgccgcgcagtgctgaatccagcctgaaaaaattcgaagaaaaatttgccgcgctgggcaaaggccgcgtagcgtccatcattggtcgttactacgcgatggaccgcgataaccgttgggatcgcgtagaaaaagcttatgacctgctgactctggcgcagggcgagttccaggccgataccgccgttgctggtttgcaggctgcttatgctcgcgacgaaaatgatgaattcgtgaaagcgaccgttatccgtgctgaaggtcagccagacgcggcaatggaagacggcgatgcactgattttcatgaacttccgtgctgaccgcgcgcgtgaaatcactcgtgctttcgtgaacgctgatttcgatggcttcgcgcgtaagaaagtggttaacgtcgatttcgtgatgctgaccgaatacgccgctgacatcaaaactgcggttgcttacccacccgcttccctggttaacaccttcggcgagtggatggcgaaaaacgacaaaactcagttgcgtatttccgaaaccgaaaaatatgcccacgttactttcttcttcaacggtggcgtagaagagagcttcaaaggcgaagatcgcattctgatcaacagtccgaaagtggctacctacgatctgcaaccggaaatgagctccgcagagctgaccgaaaaactggttgcggccatcaagagcggcaaatacgacaccatcatctgtaactatccgaacggcgacatggtaggtcacaccggggtgatggaagcggcggttaaagcggttgaagcgctggatcactgcgtggaagaagtcgcgaaagcggttgagtccgtgggtggacaactgctgatcaccgctgaccacggtaacgctgagcagatgcgcgatccggcaacgggtcaggcacacacggcacacaccaacctgccagttccgctgatttacgttggtgataagaacgtgaaagcggttgaaggcggcaaactttctgacatcgcgccgaccatgttgagcctgatgggtatggaaatcccgcaagagatgactggtaagccgctgttcatcgtggaataatccctccccatgaggggaaaggcgattaataccatgacacgggccgtgaaaccgcgcaggtttgcaatcaggcccatcatctacgccagcgttcttagcgctggcgtattgttgtgcgccttttccgcccacgcggatgagcgtgaccaactcaaatctattcaggctgacatcgccgcaaaagagcgcgcggtacgccaaaagcaacaacaacgcgcaagcctgctcgcacaattgaaaaagcaggaagaagcgatctctgaagccacccgtaagctgcgcgaaacgcaaaacacgctcaatcaactcaataaacagattgatgagatgaacgcgagcattgccaaactggagcagcaaaaagccgcccaggagcgcagcctcgccgcacaactggatgccgcattccgtcagggcgagcataccggtattcagctgattctcagcggtgaagaaagccagcgtggacagcgtttacaggcttatttcggctatctcaaccaggcgcgacaagaaaccattgcccagttgaagcaaacgcgtgaagaagtcgccatgcagcgtgctgaactggaagagaaacagagcgagcaacaaacgctgttatatgagcagcgcgcccaacaggcgaaactgactcaggcgctgaacgagcgtaaaaagacgctggcagggctggagtcttccatccagcaaggtcagcaacagttgagcgagctgcgcgccaacgaatcccgtctgcgtaacagcattgcccgtgcggaagccgcggcgaaagcgcgtgcagaacgagaagcacgtgaggcccaggcggttcgcgaccgccagaaagaagcgacgcgcaaaggcaccacctacaaaccgaccgaaagcgaaaaaagcctgatgtcccgtaccggtggtctgggcgcgccgcgtggtcaggcattctggccggttcgcgggccgacgctgcatcgctatggcgaacagctacagggtgaattacgctggaaaggtatggttatcggtgcttctgaaggtactgaagttaaagcgattgccgacggtcgggtgattctggctgactggctgcaaggctacggtctggtggtggtggttgagcatggtaaaggcgacatgagtctttacggctataatcagagcgcactggtgagcgttggtagccaggttcgcgcgggccagccgattgcactggtgggcagcagtggcggtcagggtcggcctagtctctatttcgaaattcgccgccagggtcaggcggtcaatccacagccgtggttgggaagataagttttgtttccatttcgtcgtaacgttcttgcatttgccgctctgttggcgctctcctcccccgtacttgctggcaaacttgccatcgtcattgatgattttgggtatcgcccgcacaacgaaaaccaggtgctggcgatgccttccgctatctccgtcgctgtattacccgatagtccgcacgccagagagatggcgaccaaagcgcataacagcgggcacgaagtgttgattcatctcccgatggcaccgttgagtaaacagccgctggagaaaaatacgctacgcccggagatgagcagcgacgaaattgagcgcattattcgtagtgcggtcaataacgtgccctatgccgtggggatcaacaaccacatgggcagcaagatgacctctaacctgtttggtatgcagaaagtgatgcaggcgctggagcgttacaatctttacttcctcgacagcgtaaccatcggtaatacccaggcgatgcgcgccgcgcaaggcactggcgtgaaggtgatcaaacggaaggtattcctcgacgatagccaaaatgaagcggacatccgtgtgcaatttaatcgcgcaattgacctggcgcgtcgcaacggtagcaccattgccattgggcatcctcaccctgcaacggtacgcgtgttgcaacagatggtttataacctgccgccagacattacgctggtgaaagccagcagcttgctgaatgaaccgcaggttgatacttctacaccgccgaaaaacgctgtgcctgatgcaccgcgtaatccgttccgtggcgtgaagctgtgcaaaccgaagaaaccgatagaacctgtttatgctaatcgcttctttgaagtattaagcgaaagcatcagccagagcacgctgatcgtttacttccagcatcagtggcaaggctggggcaaacagcccgaagcggcgaagtttaacgctagcgcaaattaattagcgcaaattaaaggcgctacgcgtaatgcgatggtggctccgcgttttgtcgcgccattgccataagcggaaagaccacagtaacgcctggtaaccgaccttcacgctgcgcacattggtaatcaggcgcttatacataccggaagtaaatatctcggcaatcatccgttggcgggtaagaatatccggctctttgcgcaccgcatggcaaacacgcaatgcctcgtaagttatttgctgatgaaattccggataaatcataattttgtcggcataatttcgatttaatttctccagcaggcgggtaatcttaatatagtgacgttgataattaaggtttttattcccttgtctatgcaaccgactcacactcgtattatgcagataatatttatataaactttgctcggtatatcgcgcacgcagcgcgttaaacatgaattctgttgtccagacaatatcctgatgatgtaatccggcaataaatttaatgttatttttaacaataacatcacggcgataaacccccatccagacaacgtgagtccaacggcggctagaaagccccatccgcagccagtccgggccggttaatacgccggtactgcgaaggcgatcggtggggatggattgccaggtttctcccgtttcacgaaaacaccagtcagcgttgcactgcgccacgtcgaggtcgtcctctaacgccatggtcatcagcgtttcgtacatggtgggatagacttcatcgtcagcatcgacaaaagcgacatatttgcccgttgccacttcaatcccacgattacgcgccacgcttgcgccagcattcgcctgatgcaacaaacgaacgtgcggatagttttctgcgtaatactttgctatttcaacagaattatccgtactaccatcgttaataataatgatttccagagcagtccaggtttgcgtaattaaagattccatacaagtgcggaaatcatcgcccgcattatataacggaataataacactaagtttattggtgctgttcatcataaattaccgacgacctctgaagttatcctgacgttttacaggctttgtattaagaaactattaagcctgtgagatattatttttacaggtgagagagtcacttcagggtagagagataatgagagcagctatataagagatcagcacaattacgaactctttattacactgacaggattttacatatttaacagattatcctcagataaaagggctggaataccagcccttgttcgtgttaatcccagctcagaataactttcccggactggccgctacgcatagcgtcaaagcccttctggaaatcatcgatagagaaacgatgggtaatgatcgggctaagatcgaggccagactgaatcagcgccgccatcttgtaccaggtttcaaacatctcacgaccgtaaatacctttaatgaacaagcctttaaagatcactttggtccagtcgatagacatatcagacggcggaatacccagcatcgcaatacggccgccgtgattcatggtgtcaagcatggtacgaaacgctggcggcgcaccggacatttccagaccgacatcaaaaccttcggtcatgcctaactccgccatcacgtcattgagattttctttggcgacgttaaccgcacgggtgatacccattttacgcgccagctcaaggcggtattcgttaacatcagtgatcaccacattgcgtgcaccaacgtgtttcgccaccgccgctgccataataccaatcgggcctgcaccagaaaccagcacatcttcgcccaccagatcaaagctcagcgcggtatgcacggcgttaccgaagggatcaaaaattgcggctaagtcatcggaaatattgtcggggattttgaaggcgttgaatgccgggatcaccagatattcggcaaagcagcccgggcgattaacaccaacgcctatcgtgttgcggcacaaatgggtacgaccaccacgacagttgcggcaatgaccacaggtgatatggccttcgccagaaacgcgatcgccgatcttgaagcctttcacttcctgaccaatacctaccacttcaccgacatattcatggcccacgaccatcggcaccgggatggttttttggctccactcatcccagttatagatgtgaacgtcagtcccgcagatggctgttttacggattttaatcagcagatcgttatgcccgagttccggtacaggaacgtcggtcatccagatgccctcttccgctttcagtttggataacgctttcatctcacatcctcaggcgataacgcccagttgtttaccaatacgcgtaaatgcttctactgcacgcgtaatttgctcaggggtatgcgccgcagacatctgggtacgaatacgcgcctgacctttcggaacgaccggatagaagaaaccggtaacgtaaatgccctctttttgcagctcacgggcaaatttctgcgccactaccgcatcaccaagcatgaccggaataatggcgtgatcggctcccgccagggtaaagcccgccgcgctcatttgctcacggaactgacgcgcgttcgcccacagacggtcacgcagttcgctgcccgcttcgaccatctccagtactttgatggacgcggcaacaatggccggtgccaggctgttggagaacaggtacggacgagaacgctggcgcagccactcaaccacttctttgcgcgccgcggtataaccaccagaagccccgcccagcgctttaccaagcgtaccggtgataatatcgacccggcccatcacatcgcagtattcatgggaaccacgaccattttcaccgacaaaaccgaccgcgtgggagtcgtctaccatcaccagggcatcatatttatctgccagatcgcaaacgcccttcaggttggcaatcacgccgtccatactgaacacaccatcggtggcgatcagcacatgacgcgcaccggcttcacgcgcttctttcagacgtgcttccagctcctgcatatcgttgttggcatagcgatagcgtttagctttgcacagacgcacaccatcaataatagacgcgtggttcagtgcgtcggagataatggcgtcttccgcacccagaagcgtttcaaacaggccaccgttagcatcaaagcaggaagagtagagaatcgcatcttccatccccaggaaggccgccagtttttgttcaagctctttatggctgtcctgagtgccgcaaataaaacgcacgctagccatgccgaaaccgtgagaatccattcccgcctttgccgccgcaatcagatcaggatgattcgccagcccgagatagttgttggcacaaaagttaatgacgtggcttccatcagccacagtgatatctgcttgctgcgcagacgtaataatgcgctcttctttaaacaacccttccgcccgtgcggtttccagatcgttggttaactgctgataaaattctccacgcattgcgattctccagacagggcaaattccagcacatattacccaaacttataggtcgcgacgagataacgcgttaacacttctgcaaaattcaggataaataacgtgtaacttgatgtctctcaacacctacagatagtagaaaaactgtacagttttggctgggcataatgatgattgattttactgcattgatataaaaagaaaaaatgatgccaaagcatcatttttcctatctcagttggtatcaaaacgctacccactaatggagggaaacttattttctactaaggaaaattctcagcgcctgcatttttgcccctaaagtgttactcctgaagcagcgaaacaaatcgaaccattttcctctccccagatagtttaggttgaagagatcggggcgtttgtaatagcacatgacaaaaatgccctggtcatcgtccacaatgttattatttagtgttattttttgactttccagaactaatttatagaattctttccatttatgctgactaccaacaattgcgcccccaataatatatacatgattgccaatcatgaaatcaaaaacctgttgttgagatgtgacagtaagccctttttttatagtgaaaagatgcatcttactttcatcaaatgggaaatcccaaattttcaatcctcgagttacatttggcttatggcaatagccaaaatctatccacgcaacaagaggcgttttcactaagcccatgttgatagctttatttacaaaataggccttaaggttacataccaaaacatactctggactccagtactctgggttttttaattgtcgaggctcaagtctatttgtaaagctctcatctttttgaattttttcgatacgacttctgatatatctaaatttcttttttatatcgataacgataaccgttgttggttttccgttgcgaatcgcttcaacccttggtttcaaatcgggagaagtgaaaataatcatctcattttcaagtgcggccagacgctcaaagtaactaaaataaacatcaacactacgagctagtttttcacggaaccctttattagcagtccaatcccctctaccaatgtcaaaatatgcagtgataattgtggtggaacttttcattactaataagaccattaatataaaaaaagaattatatcataaatattaatagaatgtatactgtatattatccattcaaatgcttccgttatttatcatacatcggaatattgatactaaagcactattcacatgcaaaaccaacatccgccatgaaggactagctaaaacccaaactagtttgttgcaattagcatccttgcacctctatgtaaagggctgaagggattcggatgtgatggtatgattacagacattcgtgtctgagattgtctctgactccataattcgaaggttacagttatgatcatcgttaccggcggcgcgggctttatcggcagcaacatcgttaaagccctgaatgataaaggcatcaccgatattctggtggtggacaacctgaaagacggcaccaagtttgtgaacctggtggatctgaatatcgcagactatatggataaggaagacttcctgatccagattatggctggcgaagagttcggcgatgtcgaagcgattttccacgaaggcgcgtgctcttccaccaccgagtgggacggcaagtatatgatggataacaactatcaatactccaaggagctgctgcactactgcctggagcgtgaaatcccgttcctgtacgcttcttccgcagccacctacggcggacgcacctccgactttattgaatcccgcgagtacgaaaaaccgttgaacgtctacggttacagtaaattcctgtttgatgaatatgttcgtcaaatcctgcctgaagcgaacagccagattgttggcttccgttatttcaacgtttatggaccgcgtgaaggccataaaggcagcatggcgagcgtcgctttccatctcaacacccagcttaacaacggtgaaagtccgaagctgtttgaaggtagcgagaacttcaaacgcgacttcgtctatgtgggcgacgtggctgatgtgaatctgtggttcctggaaaatggcgtttccggcatcttcaatctcggtactggtcgtgcggaatccttccaggcggtagctgatgctacgctggcttatcacaagaaaggccagatcgaatacattccgttcccggataaactgaaaggccgctatcaggcgttcactcaggcagatctgacaaatctgcgcgcggcgggttacgacaaaccgttcaaaaccgttgctgaaggtgtaacggaatacatggcctggctgaatcgcgacgcataagagctctgcatgaaaatactggtgatcggcccgtcttgggttggcgacatgatgatgagccaaagtctctatcgcacgctccaggcgcgctatccccaggcgataatcgatgtgatggcaccggcatggtgccgtccattattaagccggatgccggaagttaacgaagctattcctatgcctctcggtcacggagcgctggaaatcggcgaacgccgcaaactgggtcatagcctgcgtgaaaagcgctacgaccgcgcctacgtcttacccaactccttcaaatctgcattagtgcctttcttcgcgggtattcctcatcgcaccggctggcgcggcgagatgcgctacggtttactcaacgatgtacgcgtgctcgataaagaagcctggccgctaatggtggaacgctatatagcgctggcctatgacaaaggcattatgcgcacagcacaagatctgccgcagccattgttatggccgcagttgcaggtgagcgaaggtgaaaaaagttatacctgtaatcaatttagccttagtagtgaacgtccgatgattggtttttgcccgggtgcggagtttggtccggcaaaacgctggccacactaccactatgcggagctggcaaagcagctgattgatgaaggttatcaggtggttctgtttggcagcgcgaaagatcatgaagcgggcaatgagattcttgccgctttgaataccgagcagcaggcatggtgtcggaacctggcgggggaaacacagcttgatcaagcggttatcctgattgcagcctgtaaagccattgtcactaacgattctggcctgatgcatgttgcggcggcgctcaatcgtccgctggttgccctgtatggtccgagtagcccggacttcacaccgccgctatcccataaagcgcgcgtgatccgtttgattaccggctatcacaaagtgcgtaaaggtgacgctgcggagggttatcaccagagcttaatcgacattactccccagcgcgtactggaagaactcaacgcgctattgttacaagaggaagcctgacggatgcgggttttgatcgttaaaacaagcagcatgggcgatgttctccatacgttgcccgcactcactgatgcccagcaggcaatcccagggattaagtttgactgggtggtggaagaagggttcgcacagattccttcctggcacgctgccgttgagcgagttattcctgtggcaatacgtcgctggcgtaaagcctggttcagcgcccccataaaagcggaacgcaaagcgtttcgtgaagcgctacaagcagagaactatgacgcagttatcgacgctcaggggctggtaaaaagcgcggcgctggtgacgcgtctggcgcatggcgtaaagcatggcatggactggcaaaccgctcgcgaacctttagccagcctgttttacaatcgtaagcatcatattgcaaaacagcagcacgccgtagaacgcacccgcgaactgtttgccaaaagtttgggctatagcaaaccgcaaacccagggcgattatgctatcgcacagcattttctgacgaacctgcctacagatgctggcgaatatgccgtatttcttcatgcgacgacccgtgatgataaacactggccggaagaacactggcgagaattgattggtttactggctgatagtggaatacggattaaacttccgtggggcgcgccgcatgaggaagaacgggcgaaacgactggcggaaggatttgcttatgttgaagtattgccgaagatgagtctggaaggcgttgcccgcgtgctggccggggctaaatttgtagtgagcgtggatacggggttaagccatttaacggcggcactggatagacccaatatcacggtttatggaccaaccgatccgggattaattggtgggtatgggaagaatcagatggtatgtagggctccaagagaaaatttaattaacctcaacagtcaagcagttttggaaaagttaagtagtttataaaggtaaaacatgctaacatcctttaaacttcatagtttgaaaccttacactctgaaaagtagtatgattttagagataataacttatatattatgtttttttagtatgataattgcattcgtcgataatactttcagcataaaaatatataatatcactgctatagtttgcttattgagtctaattttacgtggcagacaagaaaattataatataaaaaaccttattcttcccctttctatatttttaataggcttgcttgatttaatttggtattctgcgtttaaagtagataatagcccatttcgtgctacttaccatagttatttaaatactgccaaaatatttatatttggttcttttattgttttcttgacactaactagccagctaaaaagtaaaaaagagagtgtattatacactttgtattctctgagttttctaattgctggatatgcaatgtatattaatagcattcatgaaaatgaccgcatttcttttggtgtaggaacggcaacaggagcagcatatagtacaatgctaatagggatagttagtggcgttgcgattctttatactaagaaaaatcatccttttttatttttattaaatagttgcgcggtactttatgttctggcgctaacacaaaccagagcaaccctactcctgttccctataatttgtgttgctgcattaatagcttattataataaaagtcccaagaaattcacttcctctattgttctactaattgctatattagctagcattgttattatatttaataaaccaatacagaatcgctataatgaagcattaaatgacttaaacagttataccaatgctaatagtgttacttccctaggtgcaagactggcaatgtacgaaattggtttaaatatattcataaagagtccttttagttttagaagtgcagagagtcgcgctgaaagtatgaatttgttagttgcagaacacaataggctaagaggggcattggagttttctaacgtacatctacataatgagataattgaagcagggagtctgaaaggtctgatgggaattttttccacacttttcctctattttagtctattttatatagcatataaaaaacgagctttgggtttgttgatattaacgcttggcattgtggggattggactcagtgatgtgatcatatgggcacgcagcattccaattatcattatatccgctatagtcctcttactcgtcattaataatcgtaacaatacaattaattaagaataaacaagtttaagaagtgagttaaaactcacttcttatctatacaacttaatctctttacactattagttaaagtttcagtatcgatatcttttaccgtatatgttggggatactatttgtatagatttatgatgattcggggaccaaattaaatggctgggatattccggagtacgactattagggtaaaatgcaagcgttggtttatgataagccgcagcgatatgaacaagagctgtatcaacagaaatgacaaaatcactatacttggtcaacgcaacggtataaataaactcatcaaatggtagtgtttcgatttcaagtattggtattgtcaataaatcttgcggtaacccggtaaatataatccgataattttcaaagtgtgttttcacttcttgatatataacttttatttgctcaaacgtaagacggcatattttttttgcacctaatggattaataatgactattcttgtatctccaataaattcttttattttatcttcaacatctactggtaaatgcaagtcgtagttggtggaaaatttaccctcaccataaatatgcttcagtatttctattgctcgtgtactcatatgttcttttaaacattcatcgtggggatggtaaaaactatagtaacgcttataccaatgatcaaaacccagaatgtaagaatcttttaaactacttaatattaagctatgcttaaaactgggcatagtttcaaaggggtctaatacaatatcgaactgtaaatcccgcagatgcttacatagagtaagcatttcaagaaaaccggtactttctttaatacagaactcaaatatatttttattattagagagaaattccccaccctttctatttgtgagaagagttattttaacccctttactataaagttcacgataaatgctacttaatacaattagatcaccaagtttattattatcatgaataataaggcaacttttaacttgtgctggatctgtaatttgattatttattttattacgaaataaaaaagaaaggaaattaatcttgattttgtttatataaaatcttttctttttgtgaaaagttcctaagcgcatttttataccatattattttagtttcaggatgattaattagcataagaatcggtactagttctatattgcattttttttcttgtcatatctttactttcttctgcactgatgtcttgaagtttaataaatggaattacatcgtaagaaatagctgtatcatcacttaaattataaatattaatatcttttacattatcatgcataaaacgaaaaaatggcaatattttgaataaatccctacttaattcgctgggcatgggatttttattctcatcatagaaacgagaacagctacccgttaaatcaagaccagaacaaataatccgcgcatacttaagactatatgcgatttgaattgcagcaaaggcaatagtatggcaactgcaataaccaagactaatgtccttgcaaaatccaaccagacgaccttttttagacaacggtacagagatcagcagttctttgtgaatctgtctcaaaatattaaatttaatcttctttataaaaccacctttttcccgacggtaaaaggaccgtaatacgaggcagttctggaggatataaagtttatcttctttggaagcgtgttcataaacgtcaacgtttactatggtataacgacttctctggctaaatttataaaaatcatcacgacgctgatgtaaaaatcggacatctgtaagtacatatataaaaggaacgatattattacttaacagatattgcgcagaaccattgacagcaataatatcctttgttcgtaatacactcaaaggtgttttttggcttgtagggccgctaagaaaaataataacatcatcagatattttattttcaatcaggttttcaacatcttttttgtcaatgtatctaatattcttcatgataaacctgtgaaataaataactccgcttaaaactgtcctggtgaagacatgtaattgtgggattttttttagcgcgctggtttccctttcaaacgccgcataaaattgcgcatttttttacgatatactaaaagataatagcctagatctctaatctcatttttaataccgtaatgacgctctaagtcaatacgatctttcgctttacgctgcgcactagcacgctttccggagagatcgataattcgaacctcaccattttttataatgaagttaccacgatgggggtcgccagaaaccatgccatgttgatgtaaggcattaatactttgctgaattttattttttagcgcatcatcaatatcgggcatatcacacaactctatgccatcaatatactcgatgatcatgatataagtatggacaaaacgtaaggttttccgttcagccaataaataaaagtcattgagtgtatttaacccttcatttcgtactttttgggtttgctcaaaaaggcgttcgtaataatcaccttttaacagagacttaaagaaacgttcgttacgcttaactttcggagaaaaaaccttaagaatcaatttaccgtaatcggtatcaataagcataacttttgtatcatcaatagaacgaaaaaccttgatgatatttatattataagacaagaagtcatttaatacattgaggtacttactattgttttcatcggtaaaaacaaccaagtctttgatcttgctcttctgaatcataataaaccagttaaatgttatttacggtaatattttcggcaaagataacagactcctgctataattcctgagatataatgatgttgcactaaaagatgtttatatcttttttaaattcaataattgatttcgcatctcgtggagagtcatctttccagggggaattttctaaagctattttatagtattttaccgatggataaattgcccatttgtgccacggtttagttgcacctgtataatgaataagaagagtactttctgtaatcagctttttatagttttgatgtgttttgtcttttaattcacttttaattgtataaattgtattgtactcacgaggcaaaaataatgtcatccctttcagtaagacattcataacatcctgatcagggtatttataaacattatctttactcataagaatagacaacgctttttctgttagttttgcgtcagcccattttcttaagtctaaataaacgacaccggaattaaagtactgcccaagtaattcaggatcagacaacctggataccgccttttcttgcattggctcaacatctttaacaacagcagcaaccgctccatttaaacccagatgtaatagttggctaatatcgcctttacaaacaacatctgcatcaagataaagcaaacgatcaagcgttaaacccaataattgaaatgcaaataaacggaagtacattgctcttgaccagacctgtgtacaaggcaagcactggagcttatcagtgttaattctatataacgtgattcttaattggttttgctctgcaagctttgcaattttttgaaaaaaaccatcattataaacatcagcaataatataaaaatcaagattaatatgtcgattatttaggacaattgatgtgatggaaacacctacaccatcaagataattagcatcgacaccataggcaacatttaaacattcagaagtatttatattagctagccgaaaatcccaggctttaactttatctatctctatggcaggaaatgagtccacaatgctacccttatatcattactttatagtttcccagttttaatgctttatcttttcaataaaataaaaaagatagttgctaaatccttttagatatctatgctttttaagcatatgttttgcgctatatcttaattgattgctattgttcggtttcagcaacgccgtattcttccatgggctagcattttttgcctccataaaggcttgacttacaggataatcccaggcccaatcatgccagggcttggttggcccgatataatggataaaaatagtatcgttggttactgggtttataaagctttctttgagttgataatttaagctgaactgggtgttatatttaatatcagcgaaaataagtttatccgccagcaacatatttaacacatcctgatcaggatgtgttatttttttgattatttctggctcatttagcattgcaatagctcgtgcagaaacctgctgagccgcccattgggcagtattaatcaataaaaaaccggagttaaagtaacctttagcaattcccgcaacacctaagctatgggcgcgtttttcccaccagtcagcttgcccttctgtaacaaccattgcgactttatcgtcaggaaaactgaaattaattagtggctcaatagtcccctgacaaatgatatctgcatccagataaaggactttaggcgccttattaataaagtaatctgcaataacaaaacgaaaatatattgcatgagtccaattcttagtgctaggcaaactgcgcagtcgatcaccattaatcagatatattttaattctggttttatactgcaacgccagggcatcaaaatacttacgatcatcatcaccaaaataatcagtaaaaatatggaaacacaatcgacttccttcattatattttaatatactagcaatgctaattccgcaaccaaatagaaagtttttgtcagttccataagcgatgtccagacaaagattttctgtttctactttatgatcataatcaataacactattaagaaactcagtttcctggaaaaacacctgctgcattatttcctccgggaaatagcagaaataattaccttatgtaatctatcgtaatacttgctttggtaaaattcatcgatgctcgcaggaattttttcatgttcgatatgaatttcacctgctatatatttatttagaagagttacaaaaccagcaatatctcccggttgatacagatggccattgacatcaggttgaataatgtcagcaggcccggagacacaatcggcactgatacaaggaatcccccagctcaaggcttcaagtagggtcattgggaaaccttcaaaagaactcgtgagcaataacgcactcactttttcaatatcttgctggaccaattcccagggatattgttgccaaccataccagacaattcgatcatcaatatttaattctctaccataagcctggcatttttcgaaatcggagccatcacccaatacatggagtttccagttacctttcgcttgacttaagccatcaagcaggtctttaactcttttctggccttcaaatttcatacgcccaacataaataaacgttgccgtttcaccttcctcgggcgcgggaatgacactgtctttagtttcgacgggattaaaaataacatttatcgtgctttctgctacacctcgattaatcatttgctgtttaatgccagagctgattgctaaatgatagtcggcacaggtgatatattcagcatgttttttgtgatctaaagaaaaatgtggccaactaaatactggcatatcaattccactttttttacgtgcttttgcggcaaacaggcaggagatcacatcaatacaaataacgatatctggttggtactcctgaagccatttacttagagcatgaatatgtttcgcccgacgcaaaaaacctaaacgaatattggaaaaactacaactgtatttaataccttccagccatcccttatccattttgtcattacgacaaaagaaaaacatttcactttggatatgttgttgcctgaaggtagtaataacatcacggatgacagtttccatgccgccaaatccagaaacagcttcgccgataaacgctattttcatagaaactctcattaattgagtaaaactcactgttttaacggttttatttgtctataaaatcagaaacaatcgtactcatcattttatctggactgaatttatataaactatcataatccattggtttaacagaactgttaataaaatactctaacttatcccaatcatcatgacctattataaaaaagcgagattcactatagatttcactaccaaatacatttatattattagtaattaattttttattgaaaaatagtgcctcaagtatacgaagagtccagccagattggttttctttggttatatcaacaattatattagcatttaatgttcttctaatattctcttcataagatatttgtttttcaatcaaatacttactagtcgtagaacttgtcttatctttgacaacattaaaatctagcttacatcctagtgttgttaatctctcggctaactcattaattatttgaagacgccctttatcacgaccaaggaaaaaacatattggctggctgttatttttgtcagataaactataatttctaatttcatccattcctataggaaaaaattgttctattgccttgatcttttcattccctataaatctatgctcaaaatcatatataatatcgaaataattcgcgttatcaagaataaaatcttcgccaacagtatttcttagaagcaaaactttatgacagttaatattttttaatatttgtttattgatacctttattaacaacactgtcattaatgataattatgtcatcttttttaatatcattgaggtaatgcttgatgaataatcgccccagccatgcattatccatccctattttacttatttttttattaatccagttatatttttttggtgttgttatattttttatcttgtacttttttttcaggtactgaatcatttttaattcataatctgcaacccaatttataaaataaatagtcataataaagttagttccagtacatactaataaatatttttataatcctttgcgttgtgttcgctctttaatacgctcggccttaacgcttgccatgttcaataaattctgttcaagagacaatattttgcgtaaaggcatcccaaaataaaccttcataaatcgccagatatctctttgcgtcaggccaatattcatactactgaaatataaaccaatcaggtctttatcgcgccagcggcgcggtacttttgcacgtatctgtgcccgatgcagatcgataacactaatttttaattcatcttcccggccagtaaatggcaaatgaagcaaaaagtggcaaatgtaacagtcgcggtgatttatccctgcagtatgcattttacgcaccatagttgctacacgtgcgatcagcatacgcttaacacgtatatcaggcgggttgactgcccaatcggcacaataatcttcaaggctaattgtgggagtgagatcttcggtaataataaaacttgcgcgagttaatggatttaaccctttttcgccaaacccaatgcccttcattgtatcaacgccaacatcactcaggcgatgaatagcgtgccactctctgtctgcgcccaaaacgggcatccgcaaactgagtagattttttataatctcttttaatgtcgtccccttgtgccatttaagaaaatagcttttcccggacagttcaaagcgtaatgtacgacgagtctccagttcacgaaagacctcgccgttcagttttttgacctctgcaaaagcatctttaccacgccaaagtgtggcaagcggctcttttaattcaaccatctaaaccacctgtaatgatatccgcggctttttctggcaagctatacaaatcctgagtatcggcataatggcgagcattctccgcccaggccattcgcaatgggctctgagttaacgctttacgtaaaacttcatttaattgttcctgagagaaaggttcagcgatgaccgttccacaattggcatccgcaatataatgcgcgtacccacataccgctgttgttaaaacaggtaacccagcagtgatcgcttctagaagaacgatacccgcggcttcctgataagcgggatgcagtaataaatcagcggctgccattaattcactcacatcattgcgaccgaagaagaaatgcacattgctccgcacgccgagtttttctgccagcgcttcaaattttcgcggcttatcctgaccaacaacaaataaaagcgtattgtgacgtaaactttccggtaagcttgccaaagcttcaatactgcgatctacacctttacggccaaaatcacttccaacctgcagtaataagttttgttgctcttttatgccatttttctggcgataaatttcacggctgtttgggatttgctcactgtattttctgtccggataaataccgggaggaagaatttgaaaacgttcaggttcagtttgataatgcttctggaaatcggcgatttgcttatcggtcagcatcataagtttcgtgcttttaccctgctcgaaagtcgctcgctcaaatgcggcataatggcgatatcgacttgttaaacgatataaaaaacctttttcttgcgcaactttctcggcgtaacaaacatcagcggcaaaataaacatccaggccaggcatcttattaaacccaacaacgcgatctgcgggatgctctttgagatgattttgtacccaggcataatattctgcattgcgtccatggttggtatgggacttaactggcacctgaataagctcaaatgctttcgggcaatcgccttcccagctctgtgtatatacccgaacatggtggccccgtgcggcaactgtacttgcaatgcgcataaagtcacgttgaagcccaccaaatggaaaatatttatataaacaaaacgccacgatcataattgtgcattcctgtcagcactaggggcatcttctggcaacagcttttccgtagcggcgatcacatcctccgctgggataacagaaagatattttttgttgcggtcaagttcatgccgggtcggcattttctgataattccccgcccagaattgaataatattctcggtccagggacgccagaatacgtgatccgttgcaccaaatagactaatgactggcgttttcactgccgctgcaatatgtcccggcgcagaatccacaccaataaaaagcactgcatgatcaattaatgcacccagttcaggaaaacgtgttttacctgcaaggccagtaatgggttttgtttcgcaacctcgtgcaatctcatctacacaagcgagatcatctgcgctgggcccacaggttagcacaacctgatagcctcgctgttgcagcgcatcgataaccttagaaaatttatcgttatcccaacacttaaatatctgacgcgctgtcggttggatgacaacataatgatcttttacgcccagggcatctaattcccggcgcatcttcttccagcaatcttcggcgtaactcattgttgtgtcggtgtagaaatcggtaatacctaatggctcaaggacgcttaaattacgctcaacaatatgtgtaccgtgtattggcgctaagtgtgtgaagctttttttccaaataccatgctgccgatgaccataaagttggcttattttcatccgtgcaggtaaacaacgtaccagcagcgccaccatccactgatccgtaagattaatgaccaggtcataattattcgcacgcagagtttttatcaagctaagcacatttttaattttatcgaaagttcccgcacctttattgcttatcccatagagcgcattaatttccgggttttcagacaaaatagggatggtgtcctgataaagcagcatatcgatttttgcatcaggataattctgcttgagcgtactgatgacaggagtagttaataacatatccccatgatatcgcatctttatgaccaggatttttcgaaatggcttttccactagcgactcttttgtgtgattgtctggttaagttaagcagaaaaaagcacgctaccgccccaggctcaacagctacctgaatactgataacgcacttactttgacgtgctagtgtatcatttctttcgcagcaatccgacccgaatgatttttatacacaaaatatactttaatcataaaaatcaaatagataaaaaatagcatttcgataatgtcagtacggcctatgtagatttgaaaatggggccgagtttcaatgaatcgcataaaaatacaaaaaaaatgaagatgtagcggcagatcagaccaaactgaagctatttaagtcaaaaacgggaaaagtaatggtaaagccacagctaaatacatagaatccccagcacatccataagtcagctatttactatgctcgaattgctttacaccgcccttctctaccttattcagccgctgatctggatacggctctgggtgcgcggacgtaaggctccggcctatcgaaaacgctggggtgaacgttacggtttttaccgccatccgctaaaaccaggcggcattatgctgcactccgtctccgtcggtgaaactctggcggcaatcccgttggtgcgcgcgctgcgtcatcgttatcctgatttaccgattaccgtaacaaccatgacgccaaccggtagcgagcgcgtacaaagcgctttcgggaaggatgttcagcacgtttatctgccgtatgatctgcccgatgcactcaaccgtttcctgaataaagtcgaccctaaactggtgttgattatggaaaccgaactatggcctaacctgattgcggcgctacataaacgtaaaattccgctggtgatcgctaacgcgcgactctctgcccgcagcgccgcaggttatgccaaactgggtaaattcgtccgtcgcttgctgcgtcgtattacgctgattgctgcgcaaaatgaagaagatggtgcacgttttgtggcgctgggcgcaaaaaataatcaggtgaccgttaccggtagcctgaaattcgatatttctgtaacgccgcagttggctgctaaagccgtgacgctgcgccgccagtgggcaccacaccgcccggtatggattgccaccagcactcacgaaggcgaagagagtgtggtgatcgccgcacatcaggcattgttacagcaattcccgaatttattgctcatcctggtaccccgtcatccggaacgcttcccggatgcgattaaccttgtccgccaggctggactaagctatatcacacgctctagtggggaagtcccctccaccagcacgcaggttgtggttggcgatacgatgggcgagttgatgttactgtatggcattgccgatctcgcctttgttggcggtagtctggttgaacgtggtgggcataatccgctggaagctgccgcacacgctattccggtattgatggggccgcatacttttaactttaaagacatttgcgcgcggctggagcaggcaagcgggctgattaccgttaccgatgccactacgcttgcaaaagaggtttcctctttactcaccgacgccgattaccgtagtttctatggccgtcatgccgttgaagtactgtatcaaaaccagggcgcgctacagcgtctgcttcaactgctggaaccttacctgccaccgaaaacgcattgaggttgttatgcaaaaacgggcgatttatccgggtactttcgatcccattaccaatggtcatatcgatatcgtgacgcgcgccacgcagatgttcgatcacgttattctggcgattgccgccagccccagtaaaaaaccgatgtttaccctggaagagcgtgtggcactggcacagcaggcaaccgcgcatctggggaacgtggaagtggtcgggtttagtgatttaatggcgaacttcgcccgtaatcaacacgctacggtgctgattcgtggcctgcgtgcggtggcagattttgaatatgaaatgcagctggcgcatatgaatcgccacttaatgccggaactggaaagtgtgtttctgatgccgagcaaagagtggagctttatctctagtagcttggtgaaagaggtggcgcgccatcagggcgatgtcacccatttcctgccggagaatgtccatcaggcgctgatggcgaagttagcgtaacgtttatgccggatggtatgccatccggcgcgcatgaattacttctggcactgccgacaataaaacgttgcccgctgcgcatgtttagtcgccacaatcggcgtaccgcacacccgacacggctcaccttttcgcccgtaaacctgcaattcctgagcgaaatagcccggtttaccatcactttgcagaaaatctttcagcgttgtaccaccctgctcaatgctacgcagcaacaccgctttaatcacccgagctaacaattcacactctgccaggctcagactactcgccagccgatccggatggatccccgccgcaaacagactttcgctggcatagatattccctacccctaccaccagcttgttatccatcagccacggtttaatcgccgtttttttcttcgcgcacttctgatgcagatactcaccattgaaatcgtcgctaagcggctccggtccaagatgggtcagcacattatgcccttccagctctttggtccacagccaggcaccaaagcggcgcggatcggtgtagcgcagcactttgccgttgctcatcaccaaatccacatggtcatgcttttcagggggaagttcttctggaaggatgcgcaggctgccagacatccctaaatgaatgataatccagccctcaggcagctccagcagcagatatttagcccgccgctgcacgctaagcactggttggtcgcttaaacggtagatctcttcactaaccggccagcgcaagcgtccgttgcgcaccactgcatgaagaatggttgcaccaacgagatgcggttctatgccgcggcggctggtttcaacttcgggtaattcaggcatagcatctccaggaatgaacagatgcagtcaatatgggggcaagcagataacaaaaaaccccgccggagcgaggttttttgttacatcaaagcgagaattatttgattttcgcttctttgtagatcacgtgctggcgaacaactggatcgaattttttcagttccagtttttccggcttagtacgtttgttcttcgtagtggtatagaagtgaccagtaccagcagaagaaaccagcttgattttctcacgaatacctttagccatgatttatttcctctaagtacttagtacttttcgccacgggcacgcagttcagccagaactgtatcgatgccttttttatcgattacacgcatacctttagcagatacgcgcagggtgacaaaacgcttctcgctctcaacccagaaacggtgagagtgcaggttcggcaggaaacggcgtttagtcgcgttcagtgcgtgggaacggttgttaccggtcaccggacgcttgccagtaacttggcagactcgggacatgtctattctccaaaaatcaaattagctcgagcttcgtatggggtattggcgcctcgtcaggctttacagcccggtcatcgcagttctatgtgaactctcgattgccaggcccaaatgccaaacccgagattctcaaaggtggcgtagtatacgctgactcagcgatgtgctcaagtcccgaacagacaaagatcccgaaggatcgcgcatagcgggttaaatccagccgcgttcggcaaaagaaacatactctccacgcccaatcacgatatggtcgagcacgcgtaaatccatgaactgacaactctttattatccgttcagtaatgagtttatccgctttactgggttcagcacaaccgctagggtgattatgtgcaaggatcagcgcgctggcgtttatttttatcgcttcgcggataatttcccgaggatggacttcaacatggtttagcgtgccggaaaaaagacgcctatgcgttataacccggtgttgggagtcgagaaagatcaccataaagatctcccgctcctcacccgtgagctggctttgtaaaaattccctcgtcatctccgggctgagtaaagggctttcttcacgcatccgcacgttgtagtaacgccgcgccagttcagcaatcccctttaactgggcaaatttcgccacgccaattccatgaacgccactaaattgttcatattcagaggttaacaagccataaagagagccgaaattctccagcatctcttttgccagggttaatacatctttaccgcgcgttccggtacgcagaaatagcgccagcagctcgacatccgttaaggcgctaataccaaacttcagcattttttcgcgcggcatcaacagctgactattgtttttcaccttcacctcctttgtggtgctcgcatcctgtcatagccgtttcgttaaatcgacggccagttttcaatcctggaaagcgcctcgcaaagtgaatctcaggtgaaggcacgacaacaaaagtattgtgataaaatcgccaacttctggtgtcaccctacaggaaaaatcatcatgagcctggccggtaaaaaaatcgttctcggcgttagcggcggtattgctgcctataaaacccctgaactggtgcgtcgtttgcgcgatcgcggggccgacgtccgcgtagccatgaccgaagcggcaaaagcctttatcaccccacttagcttgcaggcggtttctggttatcccgtttccgacagtctgctggacccggcagccgaagccgctatgggccatattgagctgggtaaatgggctgatttagtgattctcgcccctgccacggcagatttgattgcccgtgttgctgccggaatggcgaatgacctggtaagcacgatttgtctggctacacctgcgcctgtagccgtgctccccgccatgaaccagcagatgtaccgtgccgctgccacgcagcataatttagaggtgcttgcttcccgtggtttgctcatctgggggccagacagtggcagtcaggcttgtggtgatatcggtcctgggcgaatgctcgatccgttaaccattgtggatatggcggtagcgcattttagccccgtcaacgacctgaaacatctgaacattatgattaccgccggcccgacgcgtgaaccgctcgatccggtgcgttatatctctaatcacagctccggcaagatgggttttgctatcgccgccgccgctgcccgtcgtggcgcgaacgtcacgctggtaagtggtccggttagtctaccgacgccaccgtttgttaaacgtgttgatgtgatgaccgcgctggaaatggaagccgccgtgaatgcttctgtacagcagcaaaatatttttatcggctgcgccgccgtggcggattatcgcgcagctaccgtggccccagagaaaatcaaaaagcaggccacgcagggtgatgaattaacaataaaaatggttaaaaaccccgatatcgtcgcaggcgttgccgcactaaaagaccatcgaccctacgtcgttggatttgccgccgaaacaaataatgtggaagaatacgcccggcaaaaacgtatccgtaaaaaccttgatctgatctgcgcgaacgatgtttcccagccaactcaaggatttaacagcgacaacaacgcattacaccttttctggcaggacggagataaagtcttaccgcttgagcgcaaagagctccttggccaattattactcgacgagatcgtgacccgttatgatgaaaaaaatcgacgttaagattctggacccgcgcgttgggaaggaatttccgctcccgacttatgccacctctggctctgccggacttgacctgcgtgcctgtctcaacgacgccgtagaactggctccgggtgacactacgctggttccgaccgggctggcgattcatattgccgatcctagtctggcggcaatgatgctgccgcgctccggattgggacataagcacggtatcgtgcttggtaacctggtaggattgatcgattctgactatcagggccagttgatgatttccgtgtggaaccgtggtcaggacagcttcaccattcaacctggcgaacgcatcgcccagatgatttttgttccggtagtacaggctgaatttaatctggtggaagatttcgacgccaccgaccgcggtgaaggcggctttggtcactctggtcgtcagtaacacatacgcatccgaataacgtcataacatagccgcaaacatttcgtttgcggtcatagcgtgggtgccgcctggcaagtgcttattttcaggggtattttgtaacatggcagaaaaacaaactgcgaaaaggaaccgtcgcgaggaaatacttcagtctctggcgctgatgctggaatccagcgatggaagccaacgtatcacgacggcaaaactggccgcctctgtcggcgtttccgaagcggcactgtatcgccacttccccagtaagacccgcatgttcgatagcctgattgagtttatcgaagatagcctgattactcgcatcaacctgattctgaaagatgagaaagacaccacagcgcgcctgcgtctgattgtgttgctgcttctcggttttggtgagcgtaatcctggcctgacccgcatcctcactggtcatgcgctaatgtttgaacaggatcgcctgcaagggcgcatcaaccagctgttcgagcgtattgaagcgcagctgcgccaggtattgcgtgaaaagagaatgcgtgagggtgaaggttacaccaccgatgaaaccctgctggcaagccagatcctggccttctgtgaaggtatgctgagtcgttttgtccgcagcgaatttaaataccgcccgacggatgattttgacgcccgctggccgctaattgcggcacagttgcagtaatatgacgccggatgacttttcatccggcgagtttctttaaacgccaaactcttcgcgataggccttaaccgccgccagatgttccgccatttccggcttctcttccaggtaagcaatcaggtctttcagggtgatgatagagatcactttgcagttgtaatcacgctcaacttcctgaatcgcgctaatctcgccgcgcccgcgttcctgacgatcgaggctaatcaacacgccagcaagcgtcgcgccattggcctgaataatctccatgctctcgcgaatcgccgttccggcggtgatcacatcatctaccagcattacgcgtccttgtaacgcgctaccaaccagattgccgccttcaccgtggtcttttgcttctttgcggttaaagcagtacggcaggtccaggtcgtgatgctccgccagtgccacagcggttgtggtggcaatcgggatccctttgtaagcagggccaaacagcagatcgaactcaatgccggaatccaccaacgcttcagcgtaaaaacggcctaacagtgccagatcgcgcccggtattaaacagcccggcgttgaagaaataggggcttttgcgcccggatttcagcgtaaactcgccaaactttaacacctgcttgctaagcgcaaattcaataaactggcgctgatatggtttcatgccttcgctcctcatcttacttttctacagacaaaaaaaaggcgactcatcagtcgccttaaaaatcagtttgccagcgccgccttctgcgtcgttacaatggattgctttcccctcgggccagagccaacaagatgagtagctcttcatgggtgaacggctcgccttctgccgtcccctgcacttcaatgatgcgcccgtcttcggtcatcactacgttcatgtcggtctctgcggcagagtcttcaacgtattccagatcgcaaaccgcttcgccgttcacaattccgacagaaactgcggctaccatccctttcatcggattggttttcagcttgccgttttccaccagcttctgtagcgcatctaccagcgccacgcaggcacccgtaatgctcgcggtacgcgtgccaccatcagcctgaagcacgtcgcagtccagcgtaatggtgaactcacccagcgctttcaaatctactgccgcgcgaagagcacgggcgatcagacgctggatttccattgtgcgtccaccctgcttacctttcgccgcttcacgagcgttacgggtgtgggtagaacgtggcagcatgccgtactctgcggtgatccagccctggccctgacctttcaggaagcgcggcacgccttcttcaatagaggcggtacacaacactttggtatcgccaaattcgaccagcacgctgccttctgcatgttttgtatagttacgagtcagggtaacgggacgcacctgattattgctacggcctgctggacgcatattgaaatctccggcttgaaacaaatgtggctgcgcattatacggacttccggcggttattcctatcctgacaaggcatcgatggctataatccttccacctctccttttataaacaggaacgtctatgatccgcagtatgaccgcctacgcccggcgtgaaatcaagggtgaatgggggagcgcaacctgggaaatgcgcagcgtaaaccagcgttatctggaaacttactttcgtctgccggagcagttccgtagccttgaacctgtcgttcgcgagcgtattcgttctcgcctgacgcgcggtaaagtggaatgtaccctgcgctatgagccagatgttagcgcgcaaggtgagctgatcctcaacgaaaaactggctaaacagctggtaactgccgcgaactgggtaaaaatgcagagtgacgaaggggaaatcaacccggttgatattctacgctggccgggcgtgatggcagcccaggagcaggatcttgacgccattgccgctgaaattctcgcggcgctggatggtacgctggacgactttattgtcgcgcgcgaaaccgaaggtcaggcactgaaagcattgatcgagcagcgtctggaaggcgtcaccgccgaagtggtcaaagtccgctcccatatgccggaaatcctgcaatggcagcgtgagcgtctggtcgcgaagctggaagatgctcaggtgcaactggaaaacaaccgtctggagcaggaactggttctgctggcacaacgaattgacgttgccgaagaactggatcgcctcgaagcgcatgtcaaagagacctacaacattctgaagaaaaaagaagcggttggtcgtcgtctggattttatgatgcaggagttcaaccgcgagagcaacactcttgcgagcaagtctatcaatgccgaagtgacaaactccgccatcgagctgaaagtgttgattgagcagatgcgcgagcagattcagaacatcgaataactcgtaacgccaattcttacttttccgccttcacaaatgccgccactcaaacagagcggcatttttcttccccgcaacattcaattctgttttgcgtgcctgctccagattttgcgatgtttttttgcccagcacactgagaacgcgagatactcacaactgtatataaatacagttacagatttactttctttgcaattgatatcacatggagtgggcaatgaacgaacatcatcaaccttttgaagagataaaactgattaatgcaaacggagcagaacaatggagtgcaagacaacttgggaaactactgggttatagtgagtatcgtcactttatacctgtattaacgcgcgccaaagaagcctgtgagaacagtggtcacacaattgatgaccatttcgaggagatcctcgatatggtcaaaattggcagtaatgccaaaagagcattaaaagacatcgtactctcccgctatgcctgttacctggtagtacaaaacggcgaccctgcgaaaccggtcattgcggcagggcagacttattttgctatccagacccgacggcaggagcttgctgacgatgaagcatttaagcaacttcgtgaagacgaaaagcgtctgtttctgagaaatgagttgaaagaacataacaaacaattggttgaggcagcacagcaagctggggtagcgacagctactgatttcgccatatttcagaatcatggttaccaggggctgtatggtggattagatcagaaagctattcatcagcggaaggggctgaaaaagaatcagaagatcctggatcatatgggtagtacagaactggcggctaatctctttcgagctacccaaacagaagaaaaactcaagcgggatggcgtgaatagtaaacagcaagcaaacaccacacactttgacgtgggtcgcaaggtgaggcaaaccattcaggaacttggcggaaccatgcctgaggagttgccgaccccgcaggtcagcatcaagcagttggaaaacagtgtaaaaattacagagaagaaataacagaaactaaaaactctttttgttgattgagacacccgatgcgtaagccaaggtccaggtgcagtgaacacaatggctaaatattgcacctttcttttccccctcagttttaacctattttttcttatgcattttctcagacaagaagtcagaagaatgcatctctgctacagaaaatagcgatttcacataactacaagttatcaatttcccctccccttaaaaaatctcaatcgtgacaatgcgcacaaatcgctaccctgccagacagatttttagggagagaaccatgctgttatacattttgtatttggttggcattactgccgaagccatgacgggggcgctggcggccggacgacggcgcatggatacatttggcgtaattattattgcgaccgccaccgcaattggcggagggagtgtgcgcgatattctgctgggccactatccgctcggctgggtcaaacacccggaatatgtgattatcgtcgctaccgccgcagtactcaccactatcgttgctcctgtaatgccttacctgcgcaaagtgtttctggtgctcgatgcgctcggactggtggtcttttctatcatcggggcacaggttgcactggatatggggcacggcccaattattgccgttgtcgcggcggtaaccaccggcgtgtttggcggcgttttgcgcgatatgttctgtaaacgtatcccactggtattccagaaagagttgtatgccggtgtcagttttgcctccgccgtgctgtacatcgcgctgcaacactatgtttctaaccatgatgtggtaattatctccaccctggtattcggcttttttgcccgcttactggcgctacgccttaagctgggattaccggtcttttactacagccacgaaggacattaaggttcaaaacctgtgatctgctgggcagccagccaactgcccagcttcttgatttgcgcattttccttccattcaataacctgtctggcgcgtccgcttccagtccccggcagctgctgccagaactgctccgtgctaaataaaagttggctccaggaccgttcatcactggcattaagcgccgcccgggttagcggtattcccattgccatcacccagcgagtaaaaggctgcttacgagccagattaaactgatgccatagctgcgcacttttacttttcgcgatccccggcgtgttctgtaattgctctggcgttaataaaagccaggaaaagatatgttcaaagcgatgagtctgatgcagcgcgcgccaaccggcctcaccaatgccatccagcccaagaacctgttttgcccccagccagactaagcgactaatgaactgttcctgacaaacatcagaagcaaagtagcaggtcaagctgttaaagcggttttctggcggtgtcggttttgtacgttctgcaccgcgccacaccacatcatcaatgcgaggaataccctgaccggcaaggctgacgagaatctgatcaccaggcgcaatatcccactcctgccagcgcctgacggaaccaatattcacccgctggacttttttatcatccagcatgacaggtgcgagactcgcaaccacgcttattttaccgctcttacccaccgcaaactgaattgccttcacttcggcaacctgagctacaggttgatatttccaggccaccagccactctgcctggcccggtagccaatggcgggattctggctctttcgccgctcgtacaactacgccatcggtgacgaagggtaattccgctttccaccactcattgcgtacgcgcgcaacttcatcagcatttttcaccgcacgggtatacgtctgcgttagagtaaaacctgcggtagccagctcttttaaacgatcagacattaactgcggtccatccggccatgcccagacaaaaacgcccagagaattcagcgtgtcgctatcgtcctggcgcatcatcaagccagcaacttttgcgcgggcatttattccccccatttgttgttggatatgcccctcgcgctggagaaatatttccccctgaagcgtactgttggctaaaggcccgctaacggtttgcggcacagcggaaattaagctaactttctgcgtccagtcctcgcctttcaggccattaccgcgactgattgctttgttcagtttcccgtcccgataaaccagggttaccgcaacgccatcaacttttggctgcacccaaagatcgctacgttctcgcatccacagacttaatgcgtttttatccaccattttgcgtacacccgtatgggcaaccggatgcataaccgcaccatttaaaggcggcatcatcacgtcgcggggctcgctcccaaagcagcgttgccactgcgtaagacgggcgcttaactgatcgtaaacaccgtcttccacctcactttttccttccttccagtagtcatcgtcccactgttttatttgctgttgcaggcgggaaatttcttcctgtgctctggctgggctccaggccggacagaccgcccacacagaactttgccagcacaagatacctattaatatcgccatccatactttcatcatcacctccgctgtagatagtcaggcagatatacaacgtgatgaaagcaaagccgagtggcaaaaacggagtctgcgaggacgcttcctgaaaatcgtctttattgcagtgaatgacaggcaaatgcggaagcagctacgcaaaacgcaacaactttgcgcaaaaagtgtgagcaagggctacgtcacatggccgcgccgtgtataataagctcgtatgtaggctttatttcgctaatcacatacgaaagatactcatggctcaaggcacgctttatattgtttccgcccccagtggcgcgggtaaatccagcctgattcaggctttattaaaaacccaaccgttgtgtgacacccaggtttctgttagtcacaccacacgccaaccgcgtcctggtgaagtccacggtgaacattatttctttgttaatcatgatgaatttaaagaaatgattagcagagatgcgttcctcgaacacgcagaagtttttggtaattactatggcactagccgtgaggccattgagcaagtactggcgaccggtgtcgatgtttttctcgatatcgactggcagggcgcgcagcaaattcgccagaagatgccgcacgcgcggagtatctttattttaccgccgtccaaaattgaactggaccgccgtctacgcggtcgcggtcaggacagcgaagaggtcattgcaaagcgtatggcgcaagctgttgcagaaatgagccattacgccgaatatgattatctgattgtgaatgatgacttcgataccgcgttgaccgatttgaagaccattattcgcgccgaacgtctgcgcatgagccgccaaaagcagcgtcatgacgctttaatcagcaaattgttggcagactgaacctgatttcagtatcatgcccagtcatttcttcacctgtggagctttttaagtatggcacgcgtaactgttcaggacgctgtagagaaaattggtaaccgttttgacctggtactggtcgccgcgcgtcgcgctcgtcagatgcaggtaggcggaaaggatccgctggtaccggaagaaaacgataaaaccactgtaatcgcgctgcgcgaaatcgaagaaggtctgatcaacaaccagatcctcgacgttcgcgaacgccaggaacagcaagagcaggaagccgctgaattacaagccgttaccgctattgctgaaggtcgtcgttaatcacaaagcgggtcgcccttgtatctgtttgaaagcctgaatcaactgattcaaacctacctgccggaagaccaaatcaagcgtctgcggcaggcgtatctcgttgcacgtgatgctcacgaggggcaaacacgtagtagcggtgaaccctatatcacgcacccggtagcggttgcctgcattctggccgagatgaaactcgactatgaaacgctgatggcggcgctgctgcatgacgtgattgaagatactcccgccacctaccaggatatggaacagctttttggtaaaagcgtcgccgagctggtagagggggtgagcaaacttgataaactcaagttccgcgataagaaagaggcgcaggccgaaaactttcgcaagatgattatggcgatggtgcaggatatccgcgtcatcctcatcaaacttgccgaccgtacccacaacatgcgcacgctgggcagtcttcgcccggacaaacgtcgccgcatcgcccgtgaaactctcgaaatttatagcccgctggcgcaccgtttaggtatccaccacattaaaaccgaactcgaagagctgggttttgaggcgctgtatcccaaccgttatcgcgtaatcaaagaagtggtgaaagccgcgcgcggcaaccgtaaagagatgatccagaagattctttctgaaatcgaagggcgtttgcaggaagcgggaataccgtgccgcgtcagtggtcgcgagaagcatctttatagcatttactgcaaaatggtgctcaaagagcagcgttttcacagcatcatggacatctacgctttccgcgtgatcgtcaatgattctgacacctgttatcgcgtgctgggccagatgcacagcctgtacaagccgcgtccgggccgcgtgaaagactatatcgccattccaaaagcgaacggctatcagtctttgcacaccagcatgatcggcccgcacggtgtgccggttgaggtccagatccgtaccgaagatatggaccagatggcggagatgggtgttgccgcgcactgggcttataaagagcacggcgaaaccagtactaccgcacaaatccgcgcccagcgctggatgcaaagcctgctggagctgcaacagagcgccggtagtagctttgaatttatcgagagcgttaaatccgatctcttcccggatgagatttacgttttcacaccggaagggcgcattgtcgagctgcctgccggtgcaacgcccgtcgacttcgcttatgcagtgcataccgatatcggtcatgcctgcgtgggcgcacgcgttgaccgccagccttacccgctgagccagccgcttaccagcggtcaaaccgttgaaatcattaccgctccgggcgctcgcccgaatgccgcttggctgaactttgtcgttagcagcaaagcgcgcgccaaaattcgtcagttgctgaaaaacctcaagcgtgatgattctgtaagcctgggccgtcgtctgctcaaccatgctttgggtggtagccgtaagctgaatgaaatcccgcaggaaaatattcagcgcgagctggatcgcatgaagctggcaacgcttgacgatctgctggcagaaatcggacttggtaacgcaatgagcgtggtggtcgcgaaaaatctgcaacatggggacgcctccattccaccggcaacccaaagccacggacatctgcccattaaaggtgccgatggcgtgctgatcacctttgcgaaatgctgccgccctattcctggcgacccgattatcgcccacgtcagccccggtaaaggtctggtgatccaccatgaatcctgccgtaatatccgtggctaccagaaagagccagagaagtttatggctgtggaatgggataaagagacggcgcaggagttcatcaccgaaatcaaggtggagatgttcaatcatcagggtgcgctggcaaacctgacggcggcaattaacaccacgactagcaatattcaaagtttgaatacggaagagaaagatggtcgcgtctacagcgcctttattcgtctgaccgctcgtgaccgtgtgcatctggcgaatatcatgcgcaaaatccgcgtgatgccagacgtgattaaagtcacccgaaaccgaaattaatgttttatgaacccaacacgttatgcacgcatctgcgaaatgctcgccaggcggcagcctgatctgaccgtctgcatggagcaggtccacaaacctcataacgtttctgcgattattcgtaccgcagatgccgttggcgtacatgaagttcacgccgtctggcctggtagccgcatgcgcaccatggctagcgcagcggcgggtagtaacagctgggtacaggtgaaaacacaccgcaccattggcgatgccgtcgctcatctcaaaggccagggcatgcagattctggcaacccatctttctgataacgctgtcgatttccgcgaaattgattacactcgcccgacctgcattttgatgggacaggagaaaacgggcatcacgcaggaagcattggccctggcggatcaggacatcatcattccgatgatcggcatggtgcagagcctgaatgtttccgttgccagtgccctcattctttacgaagcccagcgtcagcggcaaaatgcaggcatgtacctgcgtgaaaacagcatgttgccggaagcagagcaacaacgcctgttgtttgaaggcggctatccggtgctggcgaaagtcgcaaaacgcaaaggcctgccttatccccacgtcaatcagcaaggcgagatcgaagctgatgccgactggtgggctactatgcaggctgcagggtaagtgccatgaaaggtcgcctgttagatgctgtcccactcagttccctaacgggcgttggcgcagcacttagtaacaaactggcgaaaatcaacctgcataccgtgcaggatctactcttacaccttcccctgcgctacgaagatcgcacccatctctaccccatcggagaactactgccgggcgtttatgccacggtggaaggcgaagtgctgaactgcaatatctccttcggcggtcggcggatgatgacctgccagatcagcgacggttccggcatcctcaccatgcgctttttcaatttcagcgcggcaatgaaaaatagcctggcggcgggccgccgtgtactggcttatggcgaagcaaagcgcggtaaatatggtgcggagatgatccacccggaataccgcgtgcagggcgatctcagcacgccagaattacaggaaacgctcacgccggtttatccaacaacggaaggcgtaaagcaggccacgctgcgtaaattaaccgaccaggcgctggatctgctcgacacctgcgccattgaagaactcctgccgccggaactgagtcaaggaatgatgacgctaccggaagcgttgcgcactttgcaccgcccgccaccgacgctacagcttagcgatctggaaaccgggcagcatccggcgcaacgtcgtctgattctggaagaactgctggcgcacaacctcagcatgttagccttacgtgccggagcacagcgttttcatgcccagccgctgagcgccaatgacacgctgaaaaataaactcctcgccgccttaccgttcaagccaacgggcgcacaggcacgcgtagtggcggagatcgagcgcgatatggcgctggatgtgccgatgatgcgtctggtgcagggcgatgtaggttccggtaaaacgctggtcgccgccctcgccgcgttgcgtgcgattgcccacggcaaacaggtagcattgatggcaccaaccgaattactcgccgagcagcacgccaataacttccgcaactggtttgcaccgctcggtatcgaagtgggctggctcgccggtaagcagaaaggtaaagcacggctggcacagcaggaagccatcgccagcggtcaggtgcagatgattgtcggtacacacgccatcttccaggaacaggtgcagtttaacggcctggcgctggtgattatcgacgaacagcatcgttttggcgtgcatcagcgtctggcattgtgggagaaaggccagcagcagggcttccatccgcatcagttgatcatgaccgccacgccgatcccccgcacgctggcaatgactgcgtatgccgatctcgataccagcgtgatagatgagctgccgccaggccgcacgccagtgactacggtcgctattcctgatacccgccgtaccgacatcattgaccgcgtgcaccacgcctgcataactgaaggtcgtcaggcatactgggtttgtacgttgattgaagagagcgaattgctggaagcgcaggcggcggaagctacctgggaagagttgaaactggcgctaccagagttgaacgttggcctggtacacgggcggatgaaacctgccgagaaacaggcggtgatggcgagctttaaacaaggtgagctacacctgctggttgccacaaccgttattgaagtcggcgttgatgtgcctaacgccagtctgatgattatcgaaaacccggagcgtctgggtctggcgcagttacaccagctgcgcgggcgcgtaggtcgtggcgcggtggcttctcactgcgtgctgctctacaaaacgccgctttctaaaacggcgcaaattcgcctgcaagtgctgcgcgacagtaacgacggttttgtgattgcgcaaaaagatctggagattcgcggccctggcgaattgttaggcacgcgtcagacgggtaatgctgaatttaaagtggcggatttactgcgcgatcaggcgatgatcccggaagttcagcgcctggcacgccatattcacgaacgttacccacaacaggcaaaagccctgatagaacgctggatgccggagacggaacgttacagcaatgcgtaaaaggcggcagtgagaagaccgccatttcaggttaccctaccttcctgccggatgcgattcatcaccctacaaattcaataaattatgaatcaatacgcaggcttgataagcgaagcgtatcaggcatttgtctttgttgcggcggcacttctaccgccgcttcatcggttaaccggcaaaaatcggcaacatcaaatacaacttaattaccagcgcattgacgatatcgataaagaacgcaccgaccatcggcaccaccaaaaacgccatgtggcccgggccaaagcgttcagtgatcgcctgcatgttggcgattgccgttggcgttgcaccgaggccaaaaccacagtgacccgcagccagcactgccgcatcgtagtttttgcccatcatgcgccaggtaacgaagatggcatacaacgccatgaagatggtctgtaccaccagaatcgccagcatcggcagcgccaggctagccagctcccacagtttcagccccatcaacgccatcgccaggaacaagctcaagcttacgttacccagcacggataccgcacgctcaaagacgcggtaaaagcccattatactcagaccgttgctcagaatcacgccaacaaacagtacacagacgaaggtcggcagttcaaaagcagtgccagccaaaagttgcgcaacaattttccccaccgtcaggcagatagcaatcagcgcgatagtttcaatcagcaccaagctggtgatcatgcgtcccacatccggcttttcaaacgccgtcgggacttcctggtcatccggaataccgttcggcgtggtggagtgtttcaccagatagcgcgccaccggaccgccaatcaagccgcccagcaccagaccgaacgttgcacaggccatcgccacttccgtcgcattggtgaagccataacgttcaatgaacaatttactccacgcagcgcccgtaccgtgaccgccggaaagagtaatagaaccggccaacagccccatcagcggatcaagccctaacaagctagccataccaatgccaatggcattttgcatcaccaacagaccaacaaccacaatcaagaagatgccaaccacacgcccaccggcacgcaaactggcaatgttggcgttcaggccaatggtggcgaagaaagccagcattaacggatcgcgcagggacatatcaaagttgacttcccagcccatgctttttttcagtactagtagcgccagcgccaccaacaaaccacccgcaacaggttccggtatggtgtatttcttcaaaaaggagacggaatggaccaacttacgcccgagcagcaacgtcagcgttgcggcaacaagcgttgctaaagtatcgagatgaaacatagttactcctttgtatccgcatcactctttcatactcgtcatacttcatcgcgcagtggcaacttcatgaactatgacgggtatcgagttatgctttcctgggtcaaattctcagctgttaatgaacaaatggcatggattttaagcagaaaaataccaaaagttatataaaaaagtgcatttatctcatttaaatatttagatgaggatgtggcaaacgtttgcttttctctttcggtcagctaaaatgcccgctttgctaccacgggattgttttcgatgtctgtttccaccctcgagagtgaaaatgcgcaaccggttgcgcagactcaaaacagcgaactgatttaccgtcttgaagatcgtccgccgcttcctcaaaccctgtttgccgcctgtcagcatctgctggcgatgttcgttgcggtgatcacgccagcgctattaatctgccaggcgctgggtttaccggcacaagacacgcaacacattattagtatgagcctgtttgcctccggtgtggcaagcattattcaaattaaggcctggggtccggttggctccgggctgttgtctattcagggcaccagcttcaactttgttgccccgctgattatgggcggtaccgcgctgaaaaccggtggtgctgatgttcctaccatgatggcggctttgttcggcacgttgatgctggcaagttgcaccgagatggtgatctcccgcgttctgcatctggcgcgccgcattattacgccgctggtttctggcgttgtggtgatgattatcggcctgagcctaattcaggttgggttaacgtccattggcggcggttacgcagccatgagcgataacaccttcggcgcaccgaaaaatctgctgctggcaggcgtggtcttagccttaattatcctgcttaaccgtcaacgtaacccttacttacgcgtggccagtctggtaattgcgatggcggccggatatgcgctggcgtggtttatgggcatgttgccagaaagcaacgaacctatgacgcaagaactgattatggtgccaacgccgctctattacggtcttggcattgaatggagtctgctgctgccgctgatgctggtctttatgatcactagcctggaaaccattggcgatatcacggcgacctctgacgtttccgaacagccagtgtccggtccgctgtacatgaaacgcctgaaaggcggcgtgctggcaaacggcctgaacagctttgttagcgcggtgtttaacaccttcccgaactcctgcttcgggcaaaacaacggagtgatccagttgactggtgttgccagccgctatgtcggttttgtcgtcgcgctgatgttgatcgtgctgggtctgttcccggcagtgagcggttttgtacaacacattccagaaccggttctgggcggcgcaacgcttgtaatgtttggcaccatcgccgcctccggtgtgcgtatcgtttctcgtgagccgctgaaccgtcgggcgattctgattatcgcgctgagcctggcggttggtctgggcgtgtctcagcagccgctgattttgcagtttgcccctgaatggctgaaaaacctgctctcctccgggatcgccgcgggcggtattactgccatcgtgctgaatctgattttcccaccagaaaaacagtaattcactggcggcggtaagataattaccgccgcagtctcacctctttaaccattcccgccttgaggattgcgcgtaaatcgtgcataactcccttatgtgcatttcacgggatggaagaccatgaaatttattgggaagctgcttctctacattctcatcgctctgttagtggcgatcgctggcctctattttcttctgcaaacccgctggggagcagaacatatcagcgcatgggtttccgagaatagcgactatcatctggccttcggggcgatggatcaccgtttttccgcgccatctcatatcgtgctggagaacgtcacgtttggtcgtgatggccagcccgcgaccctggtggccaaaagtgtcgacattgcgctaagcagtcggcaactgaccgaaccacgccatgtcgataccatcctgctggaaaacgggacgctgaatctcaccgaccagaccgcgccgctaccgttcaaagccgatcgtctgcaactgcgtgatatggcgtttaatagcccgaatagcgaatggaaactgagcgcgcagcgggtaaatggcggcgtagttccgtggagtccaaaagccggtaaagtgctgggtacgaaggcgcagattcagtttagtgccggaagccttagcctcaatgatgttcctgccaccaatgtactgattgaaggcagtattgataacgatcgcgttacgctgactaacctgggtgccgacatcgcccgcgggacattaaccggaaacgcgcagcgtaacgccgacggcagctggcaagtggaaaacctgcgcatggcggatatacgtctacaaagcgaaaaaagcctaaccgacttctttgcgccattacgctctgtcccgagcttgcagattggtcgcctggaagtgatcgatgctcgtttgcaaggtccggactgggcggtgaccgacctcgatctcagcttgcgcaacatgaccttcagtaaagatgactggcagacacaggaaggcaaactgagcatgaacgctagcgagttcatttatggtagcctgcatttatttgacccgattataaacacggaattttccccgcagggcgtagcgctgcgccagttcaccagccgctgggaagggggtatggtcagaacgagtgggaactggctgcgtgacgggaaaacgttgatccttgatgatgcggcaattgccgggctggaatataccttgccgaaaaactggcaacagttgtggatggaaacgacacccggttggttaaacagcctgcaactgaagagatttagcgccagccgcaatctgatcattgatatcgaccctgacttcccgtggcagctcaccgcgctcgatggttacggtgccaacctgacgctggttaccgatcataaatggggcgtctggagtggcagcgcgaatctgaatgccgccgccgcgacattcaatcgtgttgatgttcgtcgcccgagcctggcgctgaccgccaacagcagcacggtgaatatcagcgaactgagtgcatttactgaaaaaggcattctggaagccaccgccagtgttagtcaaacgccacaacgtcagacacatatcagcctgaatggacgcggtgtgccggtgaatattttgcaacagtggggatggcctgaattaccgttgactggcgacggcaatattcagcttaccgccagtggcgatattcaggccaatgtcccgttgaaacctacggttagcgggcaattgcatgccgtgaacgccgcaaagcagcaagtgactcaaaccatgaatgctggcatcgtttccagcggtgaagttacaagcacggagccggtgcggtaaacatcaatctcgccgggtacgactcagacgtacccggcattccatcaatagattacaacgtaattgtcagcgcattcccttgaggcttcaccaccagcccctgctcactttcagcctggctaccgtcttgcagaccatttactttcacaacattgcgcaggcacagtgtccagttcttcgcctcgcccgcaccagtcacagtaatcgtgttgccagtacgtgctgcttttaaagtaaagatcacgcttccgtcagcagcgggcacttcacagacggcttcatgcccgtcttgcagattgaagaggtggaatgccgtgccttcgtgccacacgtaatcgggacgttgatcgttgttgcccagcgccagtagagtgttatcacgcacataaacgggcagactcaggaagccgtgctgctgtttatgccagcgactaccgtcgagttcatcgttgtgccacaggtgtgtccagcgaccttccggcaggtagaactgcacatcgcccgcttcagtgaacaccggcgcaaccatcacgttgtcgcctaacatgtattgacggtcaaggtaatcacaagccggatcgtccgggaactccatcatcatggcccgcatcatcggcgtaccccgcgcgttcgcacgcgcagcttcacgatacagatacggcatcatgcggcatttcagttgcgtgaagaagcgcaccacatcacaggactcatcatcgtaggcccacggcacacgataagatttgctaccgtgtaaacggctatggctggagagcaaaccaaacgcgcaccagcgtttgtaaacgtgcgccggagcggtattttcaaagccgccgatatcgtggctccagaagccaaaaccactaaggccaatagacaaaccaccgcgcaggctttccgccatactttcgtagttagcgtaacaatcgccaccccagtgtaccgggaatttctgcgcaccgacggaggcgctgcgggcaaacaagacagcttcttcctcaccaacggtgtccttgagcacgttccacaccagttcgttgtagatgtacgcataatggttatgcattttctgcggatcggaaccgtcaaaccactgaacatcagttgggatacgttcgccaaagtcggtcttaaagcaatcaacgcccatcgcgaccagacctttcagtttgtcggcgtaccatttgcaggcatccggattggtaaagtcataaatcgccagacctggctgccatttatcccactgccataggctaccgtccgggcgtttgagtaaatagcctttctcttgtaactctttaaagacgggggatttttgaccgatataggggttaatccagacgcagattttcagtcctttcgctttcaggcggcggatcatcccttccgggtcagggaaagtcagcgggtcccactcaaaatcgcaccactggaaggctttcatccagaaacagtcaaagtggaaaacatgcagcggcagattgcgttccgccataccatcgataaagctgtttaccgtcgcttcgtcgtagttggtggtaaaactagtggttagccacaggccgaaggaccacgcgggcggcagcgccggacgaccagtaaagcgggtataacgatcaagtaccgctttcggcgtcgggccgtcgataacaaagtattcgagatattcactctcaacgctgaactgcactttggagactttctcgcttcccacttcaaaagagacacactggggatgattgaccagtaccccataaccacggttagtcatgtagaacgggatatttttatacgcctgttcagtacttgtgccgccgtcccggttccaggtctctaccgtctggccattgcgcaccagggcagtaaagcgctctcccagaccgtaaactgtttcgccaacgccaagatcaagccgctcaaacatataattgcgttgattattcgtgtcctgcacgtagccattatttttcacctgactaccggtaatacgttcgccgttgcgcagaaaatccagactccagaactcacctttgctgacacgcgcgcttaagttgccacttttaaactcagcataacgttctgtgttttcgattgtgaccttcacgtcctgcaaaatattgagcggataatgaggaccgttattcagcgccccctgaaaatgctcaatccgcacaccgacaataccttcctgtggggagaaaaagcgcaacgtaaataaaggcgtatcaagctgccaggtacgttcacgcacatcacggggggcagcatagaccaccatttcattatcctgctgttcaacctcgaacacctgaagcgggtgaatcaaattgaggccaggttgaatcaaccagtttccatcgctaattttcattgccgttccttagttctgcacttcttgagaggtgaattgttgctggcaacggcgtttaccctgagccagctgttccataacggttttcagattgtgcgtcgtgagactgtagtagcgtttagcgataatcgcgctcagcaaataacagatcgccggaacaatcgtgaatagcgcaataatgatgctaatcgtggcgctgttctgcgctttttctgccgcatcatatccgccataagccagcatccagccgataagagcgccgccgaaggccaaccccagtttgagcacaaacagcgtgccagcaaaactgatcccggtcaggcgtttaccattgcaccactcgccgtagtcgacggtatcggacatcattacccactggataggtgtcaccagttgatgcaacacaccaatcacgaagatgaagacaaacatagtgatgctggcctgcatgggaacaaagaacatcgcgaggctaatcactgccagcagggcgttcgtccaccagaagatagtgactttacatttccagtcggtcagaggttttgccagtgcggaaccaatcaggttacccacgcaataagtggtgagaaaagcgacaaacacttccggcgtgcccaaaatccatgtgacgtaatacatcatcgccccaccgcgtacgcacaccgccaggatattgaaaatggttagtaaaccgacaatccgccactggtcgttttgccagatatcacgtaaatcttcccgcatagacgttgttgtaggtggtgcttcaacgcgttctttagtggtgaagaaacaaaatgccagcatcatgaatgccaccacggaaaggaccgcgataccgccctggaaaccgagtggtttattatcaccgccaattaaattaaccagtggcatcatcagaacagtagaaagcatgcctcccgcggtcgccagcacaaaacgccaggattgcaggctgatacgctgagtcgggtcattggtgattacaccacccaatgcgcagtaagggatattgacgacggtataaagtaaggtaagtagggtgtaagtaattgctgcatagatcattttgccgttcatactgagatctggcgtgctataggccagtacacagacgatcccgaatggcagtgcgccaaacagtacccacggacgaaatttaccccagcgagagcgcgttcgatcggccaacaaccccatgcaaggatcggaaatcgcatccagtgcacgagcgaccaaaaacatggttccgacaaaaccggcaggaatgccaaaaatatcggtataaaagaacatcatatataacattacgttatcgaaaataatgtggctggcggcgtctcccatgccataaccaattttctctttaacggacaacacttcactcttcatctgcttttccttgatgctataggggtgctgagaccgataacgcattttgtaaaccatccctgtgagagcgaatattccgatatctggttattaatttatgattcttgttttatgtgatcgtggtagcgttaattccgctcatatatcattgtaaaatatgggttttatatgaactataatgctttcgtgataatacgctgcgtgtattaggcggaaaaaactgatctgggggatgtagaaactcaaggaagtagctataatgcgccccgcctccatgtagcaatcgaggcgcggaagatcgtcgtctccggtgaggcggctggacttcaaatccagttggggccgccagcggtcccgggcaggttcgactcctgtgatcttccgccaaaatgcctctcctgacgttctccaaccccttgtaatactgtcaatccagatattttctactgctcaatattcaatcggcttcaggaatacctggtctaaggttttgtgatggacgatgagcggctgaagaatccgcctgtcggttcttctgtcctcgaacgcatccgcgatattcacgccagtatgcgccgtgtttatttgcaggtgatttgcccccctgctgactctcagccaactgtatcgccattaaggtgaagatgttgttttactcgccccagaacacccttttttatacgactattctatttctttaaccgctggcgaaaaaaactgactataaacttcaccaataatcagactgccatcaagattaatttgttcatttaatatatcaaatcaacttgttttatttttactatcaaaaatagctcattgccttactataattaatatataaattcggtaattaattcttaacatgcttttactaataatctcaattgctggccctataatattgcgctagcattgctttctggttgtatcagcgatactcaaaaattcttaatacaatactcattcgactggtacttatttgtaactcagttatattttttcgcccggtgattcagaagaatgcaaaaaacggctaccactccaagtaaaatacttgatctcactgccgcggcatttttacttgtcgcctttctgacgggtattgcgggcgctcttcagactcctaccctaagtatattcctcgcagatgaactgaaagcccgtcctataatggtaggttttttcttcaccggtagcgctattatgggaattctggtcagtcaatttctggcaaggcactccgataaacaaggcgaccgtaaattactgattctgctatgttgcttatttggagtgctggcctgcacgctttttgcgtggaatcgcaactacttcattctcctcagtacgggcgtacttctgagtagttttgcttccaccgcaaacccgcaaatgttcgccctcgcccgtgaacacgccgacagaacaggccgtgagacggtcatgttcagtacatttttacgtgctcagatcagccttgcctgggttatcgggccaccgctcgcttatgaactggcaatgggatttagttttaaagtgatgtatctcaccgctgccatcgcatttgttgtttgcggactgatagtctggttgtttttgccaagtatacaaagaaatattcctgtcgttacccaacccgtagaaattttaccctccacccacaggaagcgggatacgcggctactttttgtggtctgtagtatgatgtgggcggcgaataatctctacatgataaatatgccgctatttattattgatgaactgcatctaaccgataaactgactggagaaatgattggtatcgctgccggtctggaaattccgatgatgttaatcgcaggctattacatgaaacgtattggcaagcgactattaatgctcattgctatcgtgagtggaatgtgtttttacgccagcgtactcatggcgacgactccggcggttgagctggaattgcaaattcttaatgccatcttccttggtattctctgtggtatcggcatgctttattttcaggacttgatgcctgaaaaaataggctctgcgacaacgttatatgcaaatactagtcgcgtcggctggattatcgccggctctgttgacggaattatggttgaaatctggagctaccatgcgttgttctggctggcgatagggatgttgggtattgcgatgatttgcctgctgtttattaaagatatttaactcaccagtctgggctaagaaaaatcggcgtggcgcaaacagagccatcctcgccatttttgctatcatgcctgcatacataaacgacaaaacagtatgcagagggaaaaatgggttccaccagaaaggggatgctgaacgttctgattgccgccgtgttgtggggaagtagtggggtctgcgcgcaatacatcatggagcaaagccagatgagcagccagtttttgactatgacgcgtttgatattcgccggtttgattctactgacgctgagttttgttcatggcgataaaatcttttctattattaacaatcataaagatgccattagcctgctgattttttccgtggttggcgcgctaactgtacagctcacttttttgctaaccatcgaaaaaagcaacgcagccacggcaacggtgctgcaattcctcagtccgacgattatcgtcgcctggttcagtctggtgcgtaaaagccgcccgggcattctggttttctgcgctattttgacaagcctggtcgggacttttttattggtgacacacggtaatccgacgagtttaagcatctctcctgccgcgttgttctggggcattgccagcgcatttgctgctgcattctataccacctatcccagtacgctaattgcccgctatggcacgttaccagtcgtcggctggagtatgctgattggcggtctgattctgttgcctttttatgccagacaaggaacaaactttgtcgttaacggcagtttgattctggcgtttttttatttggtggtcattggtacgtccctgacatttagtctgtacctgaaaggagcacaattaattggcggtccaaaagccagcattttgagctgtgcagaaccattaagtagcgcgctactctctttgctgttgctggggatcacgttcacattaccggactggctgggaacgctgctgattctgagtagcgtgattttgattagtatggattcccgtcgccgcgccagaaaaataaatcgtccggcgcggcataagtgagaattaccagccaggcaccgcgccaccgttaaaaatggtttctgccgctttagcgacttcgggactttgataagattgcagaaattccttcacgttttctgcattcttattatcttcccgtgccaccaaaatattcacatacgggctattcttatcttcaataaatacgctgtcgtgcaccggagaaagcccggtctgctgaatgtaagtggtgctgataatcgctacatcaactttgggatcatccagtacgcgcgggagctgcgccccctcgagttccataatctgcaaatgacgaggattatcggttatatccagcgcggtaggtaataacccttttccctctttcagagtaattagcttctctttttgcaacagtaaaagtgcgcgaccaaggttggtcgggtcgttggggatcgccactgtcgcgccttcttttatttgcgccacggttttgatttttttggaataacccgccatagggaagacaaacgtatttcccaccgctaccagtttataaccatgcgcctgattatcttgttcaagaaagggtcgatgctggaagacattcgcatcaagttcgccatgatttgtcgcatcgttcggtagcaagctaccgctaaatcctaccagttcaacatcgaggccatatttctcttttgccacctttttagcgacttccgcgacatcttgttctgcgccatttataacgccaactttaatgtgttttgcatcgctgctactctggtcgcaacctgccagcagaattccggccagcaataatgcggcccctgtccgtagatgatgtgttgtcagtttcatttttttatccttttattaatgattacctgactatagcggtaaggtcgctgcggtttaaaaaacgaaacgctatcgataagaataaaaaggaataaaagtggaatataaagtctggcacttcttactgaccacgcaagcgcgtttcgtacagcatgatgagagcgatgaaagcaaactacacttatgcttcattcgatacacatttgtaaaaggttgaatccatgaaaccaacgacactactgcttattttcacttttttcgctatgccaggcatcgtatacgccgagagcccttttagcagtctgcagtccgcaaaagagaaaaccacggtattacaagatttacgtaaaatttgcacgccacaggcgagtttaagtgatgaagcgtgggaaaagttaatgttgagtgatgaaaacaataaacaacatatacgcgaggccatcgtggcgatggaacgtaataatcagagcaattattgggaagcgttgggtaaggtagaatgcccggatatgtaagaacagcaacaactactgaccaacgcttctttacctgatatcaggatttcttcattttcacctttgcagtaaccaacaatgcagtcagcaacatcaatgtgccggacaacatcaacgggctagtcagaccaatattatccagcgcataaccgccgattgccgcgccacaggtattagcaagctgaataaccgccacctgaatagacccggctttttctgcctgatcggccaggctgcgggtgatccacgtactccagccgacgggaaccaatgcaaaagttagcccccagataatcgccacgccggtagcaacgattttatcgcttccccacaacgtcagtaccaacgcactcacagccagtattaacggcgcgcctgctaaggccagttttacgctacgtttaagaatgaagctgctaaggctcgtaccaataaagctggcgataccaaaactcaacagcaccagcgttaagccatccacgccgaatcccgccaggttcatatacaccgggcgaatatacgtgaagaaagcaaactgcccggcgaaagacatgaagatggcgatcatccctgccatcacacccggacgttgtaataagcggaaagtattttgtttctgatggctgggttcgcctggcagactaggcaaacttttgataatccagaaaatacacagcacgcccatcaccgccgccgcattaaagacattgcgccaaccgataagctcgcctaaaaaactgcccaacggcgcggcaatcaccagcgcaatagaaaccgcgccgaagatcacgctcagcgccttcggcaccgtacgcggcggcaccagacgcatggtcaggctcgcgctcatcgcccagaacccgcccagcgccagccccagacaggcacgaccgattaaaagcaaactgaaactgttagcaaaggaaaccagcaagcaggagagcgtcagcaaaacggcaaacaaaataacaacgtagcggcggtcagtagcctgaattgtctgggtaataaacaaactggcaaacattgccacaaaggcggtcacggtcacgctttgcccggcaaccccttcgctaatgcctaaatcctgggccattggcgtcaacaaactgacgggcaaaaactcaacgataatcagacaggcgacacaaaacgccacgctgaaaacggcactccagttcggtcgggtgatggcatccgcgccgcggttttcggcaataaattcactcatggtgttacccgtggcatgtttcaggggaaaagcgctccactttaacatactaatgtgactcgcatttaacgtttttgcaacttttacggtgttgctactgctggagttaagatcgaaacggaacagggcaaagattaccggatgcggcgtgaacgtcttatccacccgacaggtcaggcgcggtctgtaggctgataagacgaaacggtttcaatgcaaccagtgaacgccctcggcaggctgaaagaacgcgttatagcgcatctgaaaagcattaatatcctgcatttcaggttcggtttcgcgcagaaaacctagcgccagcctgacctgagcgtcggtaatcggcgcggcgaggcgagctttttgtaaaatccgatgccattgcagcaggttctgttcgctaccatcgacaatgacaatttgccagatgagcaacacctgcgcggcgttttgcaggtggctctcatccggacgatgcaaataacgtaaaaattcgtcaccagcactctttcccatttgatcgaccatgctctccacgggtacgacatcgatgttcagccgatcgctgagacggcgaatcgcttttctggccccggatgtcagcacccgaaaaccaaccacaaacactaccgccagcgtggcgagcattatccagatcatgagttctcctgcgtaatcagaactcatgatatctggaaaccctcgccagttattaatccaccagaataatcttcagtgcaaacagagctgcgaccaccaccacacacaggttcagatcgcgccagcgcccggtgcatactttcatgatgcagtagctcataaagccgagtgcaatcccttcggtgatgctgaaagtaaagggcatcatcaccgtggtaataaacgcaggcacgctttcggtaaaatcatcccagttaacgcgcgccaggctgctagtcatcagcacgccaacaaagattaacgctccggcggttgcgtaaggaggaactatcgccaccagcggactgaagaacataaccaacaggaacataacgccaaccacaaccgcagtcagccccgtgcggccaccgactgccacaccagaagtactttcaatataggcagtaacagagctggtgccgataaacgcacccgccacgctactgacgctatcaacatacagcgccttattcatattggggaatttaccgttaccatctattaagcccgctttatcagttacaccaattaatgttccactactatcaaataggttgatcagcataaaggagaaaatgataccggcgagttcaagtgttaacgcgccgctcaaatctacttcaccaatgacgccgctaatatcaggcggaatggaatagacgccgctaaaatgaacatcaccgaaaaataatccacagcaagacgtcaccacaatagaaaccagcaccgcggcatgaaaatgacgactactcaacacggttataataaaaaaccctaaaatacctaacaacacgccgtgagaacttaaatcgccaatcatcaccagcgtgtctttattggcgacaataacgccagtattttttaatcccattaaggcgataaataatccaattccgctggtgataccaatacgtaaacttaagggaatgttggagatcatccagtaccggatacgaaacagcgtgagcaaaaatagtccaactgcgccccagaatattgcgcccatcccggtctgccaggagatgcccatcgcccccacgaccacgaaggcaaagaaggcgttcagccccattgccggagccagcgccacgggtaagttagcaaatatccccatcgcaatactgccgataccggcaatcaaacaggtggtaacaaacaccactttcgggtccatttgtgccgcgccgaggatttgcgggttcacaaaaacgatgtacaccatggttaaaaaagtggtcatccccgcaatcaattctgtgcggacggtggtcccatgctgaggtagtttaaataatcggctaagcgtcccactttcattactcacgtaatcggtattgtcattattcatttttttgtccattggaggagatttaatcccttgcttttgtaaaacaaatgacaacaacggttcagtgataattatcacatttcaattgcacattaatggatattctttaataatctcgcgacgtttctttatgataaataataatcaaattgataaaatcaaaatgagaaaaatatgaataattctattaaccataaatttcatcacattagccgggctgaataccaggaattgttagccgtttcccgtggcgacgctgttgccgattatattattgataatgtctctattctcgacctgatcaatggcggagaaatttccggcccaattgtgattaaaggacgttacattgccggtgttggcgcagaatacactgatgctccggctttgcagcggattgatgctcgcggcgcaacggcggtgccagggtttattgatgctcacctgcatattgaatccagcatgatgacgccggtcacttttgaaaccgctaccctgccgcgcggcctgacgaccgttatttgcgaccctcatgaaatcgtcaacgtgatgggcgaagccggattcgcctggtttgcccgctgtgccgaacaggcaaggcaaaaccagtacttacaggtcagctcttgcgtacccgccctggaaggctgcgatgttaacggtgccagttttacccttgaacagatgctcgcctggcgggaccatccgcaggttaccggccttgcagaaatgatggactaccctggcgtaattagcgggcagaatgcgctgctcgataaactggatgcatttcgccacctgacgctggacggtcactgcccgggtttgggtggtaaagaacttaacgcctatattactgcgggtattgaaaactgccacgaaagttatcagctggaagaaggacgccggaaattacaactcggcatgagcttgatgatccgcgaagggtccgctgcccgcaatctcaacgcgctggcaccgttgatcaacgaatttaacagcccgcaatgcatgctctgtaccgatgaccgtaacccgtgggagatcgcccatgaaggacacatcgatgccttaattcgccgcctgatcgaacaacacaatgtgccgctgcatgtggcatatcgcgtcgccagctggagcacggcgcgccactttggtctgaatcacctcggcttactggcacccggcaagcaggccgatatcgtcctgttgagcgatgcgcgtaaggtcacggtgcagcaggtactggtgaaaggcgagccgattgatgcgcaaaccttacaggcggaagagagcgcgagactggcacaatccgctccgccatatggcaacaccattgcccgccagccagtttccgccagcgactttgccctgcaatttacgcccggaaaacgctatcgggtcattgacgtcatccataacgaattgattacgcactcccactccagcgtctacagcgaaaatggttttgatcgcgatgatgtgagctttattgccgtacttgagcgttacgggcaacggctggctccggcttgtggtttgcttggcggctttggactgaatgaaggtgcgctggctgcgacggtcagccatgacagccataatattgtggtgatcggtcgcagtgccgaagagatggcgctggcggtcaatcaggtgattcaggatggcggcgggctgtgcgtggtacgtaacggccaggtacaaagtcatctgccgttacccattgccgggctgatgagcaccgacacggcgcagagcctggcggaacaaattgacgccttgaaagccgccgcccgtgaatgcggtccgttacccgatgagccgtttattcagatggcgtttctttctctgccagtgatccccgcgctaaaactaaccagtcaggggctatttgatggcgagaagtttgccttcactacgctggaagtcacggaataataaaaaaagcccggcgtcatgccgggcaaaagtcaccagttacgtttatgccactgtcaactgctgaatttttttctcgcggcggattttgcgttcttccattaccgccactatcgccatcaggcagatacaaccaatcgcggcgatatccagcgcggcgaaggtgcctgcccagccggtaaggccgaataccggcgtcccatcggcaatcattcccagacctaacttggcaaagctgtcaccaatcaggtaagcaaaggtgcctttaataccatcggcagcgccaatcgcttttttaggtacaaagccaacagcagccacaccaatcaacaattgcgggccaaagaccaggaaacccaacgcaaagagagaagccagatagatatattcgttactggcatgttgatacacaccgagcgtggcgataatcagcgccagcgcgatgcaggccaccaggccacggcgaccgttcgccaggtcagagagccagccccacagcagcgtaccgaccagcgcaccagcttcaaacagcgtaaagccctgaatcgccaccgctttagagagtttcagttcctggaacgcgtatacggtactccactggtcgataccaatacgtaccacatagaggaaaatgttggcgaagcacagcagccagatcactttgtttttcagcacatactcaacaaagatctgccacttggtcatatcggtagattctgtctctttgtcctcttcgctgatctcctcgccgaacagttcttcagctttgccgaggccataagattccggggagtcgctgccgtaacgcaggccgataaaaccgacaatcagcgcgataatgctcgggaagataaacatgccgatgacatggccatcgaacaggtaatttgccccgaacagcgccacacctgctgcgcctgcaccgccaaggttgtgagaaatattccagaaaccgaggaatgtcccgcgtttacgacgcggcgtccatttggtgatggtggagtaactgcagctaccgccggtactctggaaaagccgcttaaggcgtagaaggcaatcatcaggaacaggctaacgctgccgctgcccatactggcactgaagcccagcatacaaatagcagagaggatcagcatgaacggcaggaattgtttggtgtttttgccgtcggcgtagtaggaaaccagcgttttacccacgccataagtgatggagaaacccaggccgatcatccccagctgcgtcatgctcaacccgtaggtgctaatcatatcgttctgcgcgatgttaaagttcttgcgaatcaggtacatcgtcaggtagccgataaagaccaccaggtaggattgcatgaacggtttgaaccacattttgcgccgcacttcgagcggaaggtccagggtcggcttgcgaacctggtttaagaaagccagcatgggttactcctgaaatgaatacctgcgtgaggcatgcattgtaaaaatcagcagcaaatcaggcctgagatagcgtccaggcaaaacctggaaaatttcttagttttgccggatatgaagtgaaaaggtgagatgcatcacgcttcgcgcggtgtctgggcgttcaaaaagggcagtaacagcagtgcggaaatcccggcggcgatagagataaccacaaaaaatccgctccagtgccaggtatcgagtactttcgccagcggccaaccagcaaggctcgcccccagataagcaaacaagccgacaaaccccgtcgccgcccctgccgcctctttgtgggaacactctgccgccgccataccgattaacatctgtgggccaaagacaaaaaaaccaatggtgaagaagcaggttgcctgcatcacgtagctggcaaatggcatcagccacagggagccgacactaagcaaaattccggcggcgaaaatcaaattcatcggccctcggttgccgttaaacaatttgtcgctgccccaaccggctaccagcgcaccgataaatccgcccagttcaaacatcgtcactgccgtattcgccgtgaccagatcgacgcccagtgtctcggacatatacaaattgccccagtcgttgatcgccgcccggaccacatagaccagcacatagcaaaagctaagcagccagatatacggattcagcaacacatatttggtgaggatctctttacgcgtcaaccctgccccttcttgttgttgagcaatttccagcgcgtcgtgtcgccattcaccgaccgccggtaaacctaacgcctgcgggcgatcgcgtagccgccagcagagaaaaatccccacgactatcgccatacaaccagcaatcatcatcccggcacgccagccgtaatgcagcgcagccgctgccatcacaatgggaatgagtgcgccgccgacgttatgcgccgtgttccataatgcccaccaaccgccgcgctcggtacgactataccaggccgttaacagacgcgcacacaccggactaccccagccctggaaaaaggcgttcagcacccagagcacggcaaacgcccataggctcgtgctgaagccaaacagaatgttgataatgcccgtggcgataagccctatccccataaaataacgggcattactgcgatcgctgacaatgccggagacaaacttgctcacgccataggtaatgtaaaacagggtcgctaacaggccgatatcgctacggctgagcacgccgttagcaaggatttctggtacggcggcgttaaaacttttccgcgtgaagtaaaacagcgcgtaacccagccagatggtcagcagaatatgccgacgccagtagcgatagcgggcatcaatttcatatttatcagtcattaatggcgcatcggcaggcgctttcagaaacggcaacatcatcaaaccttagacatagcgttgaggtagagaaacgctgacacgcgtgccgtgcagacaggaaatgtgtaatgtgccacccagcgccgttacgcgctcgcgcattccggtgaggccaaaaccttgttgcccggaacccggcggcaaaccgctgccatcgtcttcaataaccagcatcaaccgttcatcctgctgccagccttgcagggtgaccgcgctggcatcagcatgtttcacaatgttgttcagcccttcctggcagacacgaaacagcgtcacgcgctggttttcgcttaacgcactttcatcgattcgccattcgagatggctgacaataccgcgcccttccagctccatttcccgcatcagactgcggatggcctgctccagggtgagatcatccaactggcgcggacgtaaccgacccaacaaacggcgcaccgcgtcgtaaacgcccaggcttagttgttcgatgagctgcccgctctgcttcacgctggcgttatctgccgccagccgctgaacaatgcccgcctgagtacgaatagcagtgatggtctgaccgatatcatcatgcagctcacgcgccacatcacggcgcacgctctcttcggtttccagcaaccgttcagccagatgctgattgcgcgccagttccttttgcaggctctggttaagttcacgcaaccgctggatgccagcgccaagcaacaaccctgtcagactttgcaccagcaggctgagcaataaatccaccggatgatcgcgccaggtttgactggcgatcagcgcgatggcgttcatcaacgtcgcaatcagcgccccttgccaaccatagtgccaggccagcgcgataatcggcagcgccagacagaatggcgtaaagcggctcagttcgtccggcaatcccaactggagccagagactgataacaaacagcagcaagtaccagaccagatgtcgcccgcgccagttgattggctgagaaaccagactcggaccgagcggcagccaggtgttattggcgagatagtgccagaacaccagacatatcggggccagcgtcaggccgccagttaaagtcagcaacagcgcattccagctctctttgccgtgccaaagccagggcaggctctgcaacaacgccgccgccgttaacgccgccccctgtaacagcaaggtgcgccagtcacgctgatggcgatagcggctgatcagcgctacgggcagtaacgtcagtaaactaccgatcatcaataacggaaaatgggttaaaccgaccgcctgcgttagccagtaaatcagcagccactccgcgcccagcaatacgggccagtatccgcgcgggcattgcagcattagccccagacgcagaccaaacggaaataacagcaccgccatatcagggcgctcaaccagatgcaggctgatactccacaggcaaaaccatgcggcagagaagataaaaaagcaggcaataacggtaattaagcgggagaacaacgtcttcatcaccagccatcaaacatgcggcgcgccagctctacgtcgttactgacgcccagtttttccatcagattggcgcgatggacgtgtaccgttttcggactcaagcccagttcggcggcaatctctttcaccgccattccttgcgccagtttttccgccacctggcgttcacgtttggttagcgggtcctgacgaccggatgccagtttaatggcaatatccggcgtcagataacagccgcccgtggcaaccgtatgcaccgcagcaatgagttcatccgggctacagcgtttggaaagaaagccgcgtgcccccgcgttaagcgcctgctcaaccagcgcaggactgtcgtgaacggagagcataatcgtcgccatacctttcggcagctggcttagcagctccagaccggagatatcgggcatggagatatcgcaaatacacacctgcacaccgcgccccggcagccccgccagcgcctcgcgcccgctaccaaactcggcaactacctgcaaatcaggttccagccccagcagctgcgcaaagccggagcggacgatgaggtgatcgtctataagggcaacggtgatcatggtcttgtcctggcgggtaaaaaaaatacgcgcttaccttaacgataagcgcgatgttgttcaagccttgagcggttactgaaaaaacaccgcgatcttgttaaacatcgtcggatcggactgattacgctgcactttcacgacatcttccagcttatcgatttggcttatcatctgctccagacgctggtcgtcattgaccagtagccagatatggcttttgtcgctgtcctgaatcggcagacaaagaatgccttcaacgttaaaagcgcggcgggcaaaaaggccacaaacgtgggtcattacgcccggatggttgcgaacggtgagctccagaattacgttgtcatgagttgtgttttgcatggcttattcccccaccatttcagtattcgccgcacctggcggcaccatcgggtaaactttttcttcggcatcaatgcgcacatggatcagcgccgggccagggcgattgatgatttcctgcaaactagcctgcggatcggcttcgttattcaaatcacaggtttcgaggccgaatccggcggcaatctgcataaagttgattttgcccggataggtggcggcaaaaacgccttgctcgtagaacagactctgttgctgatgcaccagccccagcgcttcgttgttcatcagaatgattttgacatccagctgattttcactggcggtcgccatctcctgaatattcatcatcaggctgccgtcgccggagaaacacaacactttgcgatccgggttcgccagcgcagcgccaatcgccgcaggcaggccaaaacccatcgtgcccagcccaccggaggtcagccactggcgtgggcgattgagcggataagcttgcgcggtccacatctgatgctgaccaacgtcggtggtgataattgcattgtcatcgacacaggcggcaacggcgttgatcaggccgtaatggcttaacggatcgcacgctttcgggattggacacggaaactcacgctgcaaatccgctaccaactggtgccactctgcacgcggttgcgcttccaccagcgggatcaactgcgccagcacgtcatcaacatccgcctgaatcgccacgtgcggctgcttgattttacccagctctgcacggtcgatatcgacatgaatgattttggcattcggacagaactgctcggttttgccaatcgcccggtcatcaaaacgcgcaccgagcactatcaacaaatccgcctcctgcaaaatatagttggtgctgcgcacgccgtgcatccccagcatacccaggctcaacggatgcgcttttggcaacatgcccagcgccattaaagtcatggtggtaggcagttgcgctttctccgccagttcacgcacccgtgcgggcgcattgatcacaccgccgcccagataaagcaccgggcgtttggcagcgttaatcatcgccgctgcgtcacgaatgctttcttcgctaaaggcgggggcggcggctttttctgccatagcgggctgtgtttcaatctcaaaaactgccgtttgcacatccttaggaatgtctatccacaccgggcctgggcggccactttgcgcaatgcggaaggcatcgctcatgacctgcgggagttcttcgatatgtctgaccagatagttgtgtttggtgatggggatagagatgccgtaggtgtccacttcctggaaggcgtcggtgccgatcatgctggcgggaacctgaccagtgatgcaaatcagcgggatggagtccagccgcgcatcggcaatggcggtcaccaggttagtcgcacccggtccgctacaggccatacagaccgccggtttaccgtcggtgcgcgccattccctgagcgataaagcccgcgccctgttcatgacgggccagaatatggcggatttgcgtgctttggcttaaggcatcgtaaacaggcaggatagaaccgcccggaatgcctgtcacaatcttaatgccctgctgttccaggaaatgaacgataaattctgcgccggtaaagcgcttacgcgtgcttgttgtgccgctacttgccatgctccagtccttttcttctgggccgactttccgggaggtgcttaaacgaaaaaccccgcccggtttgcgccggcggggttttggaatcgtgtgttgttccagtccttacggcgcattgccgacgaccaccaccacacgcacgacgaccactgcggcggatggcgcagttggtagtagttttgcgttgagcatggaagtagtcattggggaccttgttggttttgtgtttaacaatatttatacaagcacagctttacaggggagacaatggaaaatttttcagcaagggaaaattgaggggttgatcacgttttgtactgaattgcagataacaaaaaaccccgccggagcgaggtttcgtcagtcgcctgcggctggtaaccgcaaagcacactgtattatgtcaacactgaaagtatacgtgttccgcgcagaacgcgcaatttcggcacgaattttgacgtatttagtgcatagttgagtatcgatcacagtttgcgttttgtccaaatattactgtttatttatacagtaaacttctataatatcactgtacgcaatgtgttatgcgggggccgcatcgttacccggcgcactaagttctggctgaaacgggtggtgccgtcagcgccttaaccccgcgtgagcacactgtgttatgtcaacaagcacaacgtttctccttgagataccgcgtgcacaacagctggcaacaggcagcggaaaggtacgtcagctggcagtgctcctgaaccacaggagacgcgtatgaacctggtggatatcgccattcttatcctcaaactcattgttgcagcactgcaactgcttgatgctgttctgaaatacctgaagtaattcagattcaagtcgcaccaaaggggagcgggaaaccgctccccttttatatttagcgtgcgggttggtgtcggatgcgatgctgacgcatcttatccgccctaccatctctcccggcaacatttattgccgcttttgtttacatattctgccgctaaacaattccccattcctggcgtatatctggctaacattcatcaatgtgatagattcctctcccgcatttatgggaatgcgtagtgacttattctaattatttttataaaagcatccgtgataatgaaaaggcaaagaaacgtcaatttgttattgatgttggtattactcgtggccgtcggtcagatggcgcaaaccatttatattccagctattgccgatatggcgcgcgatctcaacgtccgtgaaggggcggtgcagagcgtaatgggcgcttatctgctgacttacggtgtcagtcagctgttttatggcccgatttccgaccgcgtgggccgccgaccggtgatcctcgtcggaatgtccatttttatgctggcaacgctggtcgcggtcacgacctccagtttgacggtgttgattgccgccagcgcgatgcaggggatgggcaccggcgttggcggcgtaatggcgcgtactttaccgcgagatttatatgaacggacacagttgcgccatgctaacagcctgttaaacatggggattctcgtcagtccgttgctcgcaccgctaatcggcggtctgctggatacgatgtggaactggcgcgcctgttatctctttttgttggttctttgtgctggtgtgaccttcagtatggcccgctggatgccggaaacgcgtccggtcgatgcaccgcgcacgcgcctgcttaccagttataaaacgcttttcggtaacagcggttttaactgttatttgctgatgctgattggcggtctggccgggattgccgcctttgaagcctgctccggcgtgctgatgggcgcggtgttagggctgagcagtatgacggtcagtattttgtttattctgccgattccggcagcgttttttggcgcatggtttgccggacgtcccaataaacgcttctccacgttaatgtggcagagcgttatctgctgcctgctggctggcttgctgatgtggatccccgactggtttggcgtgatgaatgtctggacgctgctcgttcccgccgcgctgttctttttcggtgccgggatgctgtttccgctggcgaccagcggcgcgatggagccgttccccttcctggcgggcacggctggcgcgctggtcggcggtctgcaaaacattggttccggcgtgctggcgagcctctctgcgatgttgccgcaaaccggtcagggcagcctggggttgttgatgaccttaatgggattgttgatcgtgctgtgctggctgccgctggcgacgcggatgagccatcaggggcagcccgtttaagcgcacgtcaccgcagcatcgtcatcagctccatgggagaacgatgctgctttatcagatcacgcatcacccgcatatgcggtgcggagtaagaataaaacgcctgatagcccgcacaaagcacgctgtctggcgtctcctgccgagcgtgcgggcacaggcgatgccagtcgcacgcctggcagtcacagcgcggttgcgggttttcgctgccacaccatttttgtaaggtggcgtcaaaaagctcaatgctgatacgactgatatctgcccgcacccaacactcgaacagggcaattaaaaatttcccccacagctctgctgtcacgctagcggccgtcagatcgccccggtcatcaaattcaagatagggaatgagctgtacggagcggatgccccgctgtttgaaattgtgataaaaatcggcaggttgcagagcatccttgtactctacaaccagtttatgcctgtcctcttcagcatcaatgacctgacttcctgtcatgcgactctctcaataaatacgataagttgatgtatatgcgttacagcaaacagtattgcgagagataacaccgcgagggagatcaaaaatttgtcacggactacgtgaaattgggaaaaatcgctattcgtgacatccattaaattgcgattacgggtgtagtgccagaggatcagcgccacgatggcgagaatgccaatgctaatccagaataacatgcccgcctggtgccagttgtgtttgatagccaacgccatcaacgcgccgtagcccagcatggtacgaaaccacgccagacttgtgcgctccggctgcagtcctgggtcggcaatgcgtctggctttgcggctatccggcatacaacaccagtcccataacgttaattatccggcatacaacaccagtcccataacgatcaccgccacgaccatcaatattaagctaatgattaataagctgttggtgtagggcaggtcctctttcagacgcatcgctttttcattgcgtaaccagcgcaagtagccatacatcgctaacccgccggaaaacagacacaacaacaacgccagcagttcgcgaatgacgggcgtggcgaaatctggcgcaagttgatcaagcccaacccccgccgccagaaatcctagtgcagtacggatccacgccagaaaagtacgctcattagccaggctgaagcggtaatcaggcgcttctccgaggcgggaaattttcattgttgctcctttgcaatttcactaacgctctacctttagcggtttttttaagaatttcgtccgcccgtttcctgatatgcttttgccatccgctacaaggaggtcagatgggtatcatagctcaaaataaaatcagtagtttgggcatgctgttcggtgccatcgctttaatgatggggattatccactttagtttcggccctttctccgcaccaccgccaacgtttgaaagcatcgtggcggacaaaacggctgaaattaaaagaggtcttctcgccggaataaaaggcgaaaaaattaccaccgtggagaaaaaagaggacgtagatgtcgataaaatcctcaatcaaagcggtatcgcactggccattgctgcgctactttgcgcatttattggcggtatgcgtaaggaaaatcgctggggcattcgcggcgcgctggtttttggcggcgggacgctggctttccataccttgctttttggtatcggcatcgtgtgcagcattttgctgatattccttatcttttccttcctgaccggcggtagtctggtttaagcagcctgaataatgcccgccgggtgatcatcagcgggcattatcgtcagaacttctgttttttctcctccaccttcaccccttgtgtcggtaggccggtgtcatagtcgcgtacaactgggctatagccatcttgtggacgtggacgaaacgccccatccagcgcggccgtgcatctttacgccacggacgcagactccattggtaactgcggaacggatcgcgaattttgtccatgtaatccaataaggcgtcatgcattttgctgcgaacgtctgcaaaacggatatcatcgatcaggttatgcatttcatttgggtcattacggcgatcgtaaagttcatcactggtgaagaggttgagtaccagtttaaagtcatccgtcacccagcaacgcaccggaataaaaccgccaaagctgtcatgctcaatctcgtagcggttaaattccaccatcacgccgcgtggctctttcacggcaaggatattttcccccggcagaatctctggtttttcaatatctgccagcgccatcattgtcggcagtaaatcgatatgactgactggcgtatcgacctgtcgccgctccccttgcgggctacggatgatcagcggaatgcgggtgatgtcgtcatacatcgccgcccctttactgatcagcttatgtgcgcccatcatttcgccgtgatcggaggtataaataacccacgtattttcacgttgctctggcgttaaggcattgatgacccgtccgatttggtcatcaacaaagtcattacaggcaaaatagagcggatggtgataaagcccgtcatcaccgactgggcttggcatcgcctgcgcccataagcggtgatgttccggtttgttagccaggtcatcctgtgctttctcgcccagctcgtagtaaaaatcagcgtatttctctaaatactccaccggacaggtgaacgggtgatgcggctcatcatagctaaccaccatcaggaaaggctcgtctgcgcgcgcaggctgttgcagaaaatccaccgcccgattgctgatacgatgcgcccaggtgaaggtttcgtcgatatggttcgcctgtaaatcttcgacgctgtttaggccattgcgccacaggctaatctctttttccgtcagttcgctaagatagttcgccccatcgaaccagtaatcagcgtcccactccggcggacactcgccagtgccgaaatagtcatgaccgtcgagatgccatttgccgatgtaacaggtgtgatagccggcatccttaaagtagcgccccatagtggagatgtttttgcctggcgcgacgttgttggtccacgggccggactggttagcgtagataccggtaaatagtccggcccgtgcaggcgtacaaaccggactacaggtgtaggcggaattaaagcgaataccttccgccgccagactatcaatattttgcgtattcagcggtttaccgctatagcaaccgaccatattggtggcctgggtatcggtcatgacgaacagaaaattggggcgtttcataggctatccttcccgtcgggagtaaaggttacggctgggtcgtgacgatgccgccagctgtcaaaaatcaggtagacaatcactacggcggcaatgaaataactgatcatcgctaaccagcgcgtaccgtagccgccgaattcagccagcccggcatagacgccaatcatcgcgaacaggatgccaatactcgcgatcttgacgtttttccacggtttcatgtccaccgcaaacgcatctttgaaggtgaacggcgtggcgcgcggtttgataaaaccgatcaccagcatcacgaccacgttgatgcagaacgtacaggccagcacatagaggaaatggaagtcgaacttcaccagatagttgatggtgatgtagctgattatgccaatccccatcgctacttttgccgccagcgccgggatgcgcgggaagaaaaagcccataatgatgatggtaaccagcggcacgttgtaaatgccgttgagctgtttcatccagctatacagcccctgcggcgcgttggcgatccacggcgcgaccagcacgctaacgatagcgataaagaaaccaaatttgcgcccgacggtgaccagctgctgcggctcggcattctggttaatgatgcgacggtaaatacccatactgaataacgtactggcgctattcagaaagccgttgaaggtactgatcaccgcaccaaataacaccgcgccgaagaaacccaccattggcactggcagaacgttattgaccagcgtcgggtaggccatgtcggctttcggtaaatcctgatacagatgaaacgcaatcaaccctggcagcaccagtaccagcgggtcgagcattttcagcaccgccgttaacagcgcccccttttgcccttccgccaggcttttactcgccagcgtgcgttgcacgatgccctgatttgtacaccagtaaaaggtgttcaccagaatcaaaccggtaaatgccgcgccaatcggcaagggatcggtcgggccaccgatactgtttaatttctcggcgtgaacggtggtgagttgctcaatgccctgcataaagctgcccttgcccatcgcgattaggccaaataccggcaccatcaacccgccgataaccagcccaataccgttgatggagtccgccactgccattgcgcgcagtccgccgatcaccgcatacaaaattcccgccagaccaagcaaaattaccagtagccagatagccgcaccgtgagaaatctgtaggctttccccgacgtgaaacaggctgttgagcgccaacgcgccggagtagagaacaatcggcagaaagcagacgccggtggcaattaggaagcagaagtcgatgataatacgcgtcgttttatcataacgttcctccagaaaatcggggatggtggcaatgccgcgcttcagatagcgcggtaaaaagattagcgcgaggaagatcagcgtcaccgcactagtcacttcccagcccatcacgctcatgccgcttttgtaggcctgcccggaaaggccgaccagttgttccgtggaaaggttggttagcattaagctagcggcaataaccggcgcttttagactacgtccggcaagaaaatagccttgttggcttccggtatctgttttgcggaccttccaccaggtgatcaccgccaccagcagcgtaaaaccgacaaaactcaagatttgtaagctattcatctcatagcccttatttatgtttatgtcccggacgcatgaatatagggagaggtaaaatgcgtcgggtcaggcagtcagattcttaaaatacaaacgtcgtatccctgaacggattgttttctgttaagttcaggttgtgagcataattcgccggagggatattaaaatgaatggaaaattgcaaagtagtgatgtaaaaaacgaaactccgtacaatattcccttattgattaacgaaaatgtgatctccagcggaatttctctgatcagcctctggcatacctacgccgacgagcattaccgggtgatctggccgcgggacaagaagaaaccgcttatcgccaacagttgggttgcggtgtataccgtacaaggatgtgggaaaattcttttaaagaatggcgaacaaataacactgcatggcaactgtattatattcttaaagccaatggatattcactcttatcactgtgaaggtttagtctgggaacagtactggatggaatttacccccaccagtatgatggatattcccgttggtcagcaaagcgttatttataatggcgaaatttataatcaggaactcaccgaagttgctgagttaataactagtccagaagcaataaaaaataatctggcagtcgcttttctgacgaaaattatttatcagtggatttgtcttatgtacgcagatggtaaaaaagatccacaacggcggcaaattgaaaaattaattgccactttacatgccagtctgcaacaacgctggagcgtagctgatatggctgccacgatcccctgtagcgaagcctggttgcgtcgtctgtttttacgctataccggcaagacgccgaaagaatattacctcgatgcgcgtctggatctggcgctaagcctattaaagcaacaaggaaacagcgttggcgaagtcgctgatacgctcaacttcttcgactcctttcatttcagcaaagcctttaaacataaatttggttatgcgccgagtgccgtgctaaagaatacggaccagcacccaacggatgccagtccacacaattaacgtaactctggccagtacgctttgttggcctccagcaactcatccagaatagctttggcgacgctggcgctcggtaccgttttgctcaacgtaatcgcctgccacaggtgctgataactacgctgttcccaggcgtccacgaccagtttttccaccgccacttgctgactcattaaccctttctgaaactgcgggatatcgcgctccaccagtggttcaggccgtagtagcgcacgcgcatctgtttgcgatcttgcagcccaacaatttgcgccatccggctttcaataccgattggcatgtcacagatgttgaggattttcgcattcgggcgcagacgacgcgtggcttctgcgacaatggctgccgggttggagtagttgagcatccaggcatttggactatatttttccatataatccaccagttccaggacgccgccaatggaacgcatgccgtacgctattccgccgggtccgcaagtttcctgaccaacaacgccgtggcgcagcgggattttttcatccagttcgcgcatcgggtatttgccgacgcggatgtgcgccatgacaaaatcaacgtcgctgaatgccacttcaggatcggtggtgtaactaaacgcaatgtccggcgctttttctttaaggatgactttacaggcttcggcaatcacttcctgccgcgcaccatcgttatcataaaatttcagtgcacgaagcgggaaacggtcctgattcgccaggagcatcaacacgatgcctggcgtaaaggtgcttccaccgcctgcgacaaccacactgaatttggtcattatactgcctccgtaatggcaacattttctgcactttgatgagaattaattaagctatcgagctgttcacgcagctgagatacatgcagaccaatgatcacctgaatggcatcgccactacggaagacgccgtgcgctcccagctttttaaagacttcgtcatccagcgtttgactcatgtcatgcagtgcaatacgtaaacgcgtcgcgcaattgttaatgctggagatattgccgaccccgcccagggcttgcaggataccggcagcctgatccagctcttttttttggctctgccgcggtggtttggcctcggctggctttgtattcggctttactgtagagtttcacttccgcatcttcacgtcccggcgtgcacatgttgaactgcagaatcagtgtgcggaaaaccacgaagtacagcagggtaaagcacaacccaatggcgatttgggtcagcatcatatccgcgtggttgctgaacatcgggatccagttttgcggtaaaacttagtcaatcagacctccgcccatgttgcccaccacaccaaagagatacattacggtgctcatactggccgccagcacggcgtgtaccgcaaacagcaacggactaatgaacaggaaggtaaattccagcggttcggtaattcccaccagcatggcggttaaggttgcgggaatcagcaagcccgccacttttacccgattttccggtgcggcagtgaagtacatcgctaaagaaatgcccacggcaccaaagattttactgttaccgtgcagggcaaaaccgccttccgggaacaagcttttcagcggctcggcgctcaaactgaactcttgcagatgctgcgcccagtacatctgaatgccgccttcaacagctgccggaccaaagataaactgtccgtagatgaagtggtgtaaaccggttgggatcagaatacgttcgaggaaggtgtaaacccagaccccaagtgcacccgcgctacgcaggaacgcttgcagagattcaatccccatttgtacttttggccagccgagcaacgtcagccaggcacaggggatcatcaccaggaaggcgataatcaccacataagacgtcccctggaaaatgccgagaaaaaccggcagttttttatcgaacagacggttatgcagcgccgtcacaatgccggaaatgataattgcgccgataatgctggtatcgagggttttaatcccggccatcattgtcagaccgctacctgccaccgcgtcctgagtgaaatcgacgccgaagtagcttccccaggccattcccatcgcgttgatgaaatagttccaggtcaggaaactcaccatcaccgccagacaagcacgcccctgcgcttgcttagcaaggccaatgggtaaaccgacagcaaaaatcagcggcatattacggaataccgtccaaccgccctcttcaataatgtgtacgatttgcgcgaataaactgttcggatcggtcagactttccccgacaaacatcgggttttgcagcaagatggcaagacccaccacaatcccggcgaagggaaacagcagcactggcgtgaacatcgcgccgccaaagcgttgaatttgactgagcatttccacatcctcttttctcaattctgtaagtaggaagcctgattggttatgcggcaggcctggagcgaggataggaagatgcgatcggcagaacatgacgacccaatgggattcgtgatcgctttcatgcttttcgttgggcggtagagatctacgttttcgcgaaaaagtagacctctgtgagcacaggtacacagcatcgaacacatctttaaaaaaaagatgttttttcaatcgattaagcagaacttgtgtgcgcattacccgggcttgcaggcaaaaaagagatctagagatgatctacaaaagcattgcggagcggttaagaattcgacttaactccgcagatttcacgctaaacagccttcttcccggtgaaaaaaagctggcggaagagtttgcggtaagccggatgaccatccgtaaagccattgacctgctggtagcgtgggggctggtggtccgccgccacggtagtggcacttacctggtgcgcaaagatgtactgcatcaaaccgccagtctgaccgggctggtggaggtgttaaaacggcagggaaaaacggtcaccagccaggtgctgatttttgaaatcatgcctgcgcctccggccattgccagccagttacggattcaaatcaacgagcagatctacttctcccgtcgcgttcgttttgtggaagggaaaccgctgatgctggaagacagctatatgccggtaaaactgttccgtaatcttagcctgcaacatctggaagggagcaagtttgaatatattgaacaagagtgcgggattttgattggcggtaattatgaaagcctgacgccagtgctcgccgatagactgctggcgcggcaaatgaaggtagcggaacacacgccactgctgcggatcaccagcttgagttatagcgagagcggggagtttttgaattatagtgtgatgttcagaaatgccagcgaataccaggtggagtaccatttacggcgactccacccggaaaagagttaaccgatactccagaagagcaccgccagtaattggggggtgataatgcgcaggaacattaccaacggatagacagtggcgtaagagagcgccgccgcaccgctggttggatgaagattattagcaaacgccagcgccggaggatcggtcatggaacctgccagcatcccgcacatggtcaggtaattcattttggctaacatccgcgccagaatgccaacagtaatcagcggaacggcggtgatcagggcaccataaccaatccagcttagcccttcgccattgaccagggtattcacaaaatccccaccagatttcagaccaacgacgctgaggaacagcacgatccccagctcccgcagcgcgaggttggcgcttggcggcataaaccagtacagcttgccgatactgccgatacgcccgaggatcaacgccataatcagcggtccgcccgccagccccagtttcaacgcggccgggaatcctggcacaaagacgggaatagaacctaacaatacgcctagcccgatgccaataaacactggcagcatctgaacctgttgcagtttttgctgcgcattccccagcacattggcaacggcatcaattgcggacggacgccccaccagattgaggatatcgccgaactgcaggctgatatcgccactggcgaccagttcgaccccggcacggttcaggcggctgataacaacgtcatagcgttctttaaagtgcaggtcgcgaatacgttttccgagcacgttttcattggtgaccaccacacgctcgacgcgcaaatcagtgcctttcgtggacaggctagtatcgacctcctgaccaatcaccagttgcgcattatgtaaatccgctggctgacccaccagatgcagcaaatcgcccagttggataatggtatctgggctaggaacttttagggtttcttcgcgtttcagacggctgcagataattttgtcgccgttgagaatcggtacatctttaatggctaaatcatgcaggttagggttctcaacgcgaatattgatagtcttgatcagcgcgccgccattggtgcgactagactcgtgctgctgagcttctgtctcgacattgacgcggaaaataacccgcaacatccacatggtgaacaaaatcccgcaaatgccgaatggatacgccatcgcgtaactcatccccatctgatcgaccatttccattggtgtacccaggtcgcgcaaaatctgctgccctgcccccagcgctggcgtattggtaaccgcaccggagaaaatccccagcactaccggcagtggaatatcaaacagtttatgcaggatggcggtaaccagaccaccgatgatgacgatcagaacagcaaacaggttgaggcgtaatccggagacgcgcaaactggcaaagaagcccggccctacctgaatcccgatagtataaacgaacaggatcaggccaaattcctgaataacatgcagcatatcgctacttaatgtcatccccgcctgagaaacaaaatggccgacgatgatcccaccaaacagcacgccgccaatacctaatcctatgccgcgaaatttgacgttgccgataaacaaaccgacgactgccaccaaagccagaatactgaccgttaatgctatatcactcatcgtccatttctcttgagataacattttaattgctacggattatggctgaatcggtgaagcagatttgccttatagcgcacattatcacgggaaagaacgtgccgaaatatcttaaacagtcgaaatttaacgcattgttgagtaagtaagacaaaaaaagccccaccagaatggcggggcaaagagaatagctagttagctatttaacgcgggacgttcgctgatagcgatacgctgcgctgcgatgggttcaggctcattacgaattaaatcaatatgcagtaaaccgtttacgaaggttgcgccagagacttccatattttcagccagcgtaaagctcaggctaaatggctgattcataagcccttgatgcagccattttttctcttcttttggctgctccggcgtgccttttacgctcaggcgcgtaccttccagttgaatctctaaatcttcctgacggaaacctgccagcgcaagggtaatgcggtagtggttatcgtcgcttttctcaatgttgtacggcgggaagctctggctttcaccggcgttttgcagtgcgttggccagtttgtcaaaaccgatccattgacgcatcagtggggataaatcgaagttacgcatagtcatttctccttctaagaagcgagtaagtacctgcaaatccgaagattcgcatatgctccctgacggcgagcatggagatgtcaggccgcgccaggcggccttagggaattagttgatttcgatacggcgcggttttttcgcttccggaatcacgcgttcgagatcgatatacagcaaaccatttaccaggttagcaccacgaacatgaatgttctcagctaactggaatttgcgttcaaagttgcgttcagcgatgccctggtacagataggtgcgctctttttgttcgtcggcgtgagcacctttcaccaccagcagattatcctgggcggtaatttccagttcgctctcagcaaaaccagccacagcgatagcaatgcggtaatggttttcgtctaccagttcaacgttatacggagggtagccgccattactctggctctggttgttttctaagtggttaaacaaacggtcaaatccaatagcagaacggtaaagcggggataaatcaaagttacgcataatcaatagctcctgaaatcagcgagaatgtaagaccttccacaatggacaggtcaggtagccagaacacccatcaggcgcgtcctcatcggctacgatgtaaaaatgggtctggaaatgaacttttcaagccttatcagcggacttttttttgcagtttatggtctattgcatagactgagggggcagcacgaaacgttaaagtgcgatagccgccacagtgcgacgtaatgatgatgttattttcagcaagggatcgctataactcatcaggccaacacccacgatcaacagatgaatttattatgataagaaatgtgttgttagcgttcatgatatgcagcggaatgacattactcggaggatgctccagcgtgatgtcccataccggagggaaagaaggaacgtatcccggcacccgcgccagcgcaaccatgattggcgacgatgaaaccaactggggcactaagagcctggcgattctcgatatgccgtttaccgctgtgatggacacgcttttactgccgtgggatgtgttccgcaaagacagcagcgtgcgcagccgcgttgaaaaaagcgaagccaacgcgcaagccaccaatgcggttattccaccggccagaatgcctgataactgatttagcgatcagtttcggtgatccacagctggccgccttccatccacgccagccactgaccatccgggctgaagaccacggcgtccgcagaaggactattggcgtggtgttcggttaaatactcaacctcgccgctttgcgcatgggcacaagcaattcgattatccagcacaaagcccaaccattctccactcggatgccagttaaatgcagactgaatatccgttttgttatgggttaactggcgcggctcgccgccctgtgggctgataagccacagttgcacaatgccgttatcatctcgcattaaaaacgcgatttgtgtaccctgcggattacagcgcacccagtggcgcgggacgttgactaaccccggataagcccgatggtgggtaaaggttaaacgtcgctgcacgacgccacgcggtggcgcgggcagggttgtttccgttccgcttaacggcgcatcacctgccgctttccagccagcttcatcttgcggtaactcaacgataaacagctccggcactttctcgccctttgggctaagtgtgtcgccaataaatgccagcgcgtgatttcctacccatccttcttcataagcacgattgatttcatcactgccaggctgtggcgtgggcgtggttttgctcaccagcacgcaccagtggctaccgctgtattcacgcggatgctgcttttgtacgttgaccgggccaaacggcgcagcaacaccgacgtttcgcaaatccagcgccggatcgagttcatgcattacatggtcgttataggtaaagctcaccctttcaccgttcgggctaaagacatgcacatggctgccgccgcgcagcactcctggcgtatacggcgcggtaatatccatcgcatcaaggttactcatcttgccgccttcaacaatcactccgcgccgatgatggaagtcgtaatgccatgtttcatcaggattttccgggccgtggatgaaaacatatttctcactcttcggatgaacggtcaccacgccgacgtgtgcgccctgactcgcgcgatagataacctcgacctcgccggtatggatattcacacgctcaatggtctcgccggtaaagctcgcgccagaaggacgcacgtcaaataccagccactggctgtcgggcgtccaggtattggtattggtgagcaggtgattacggggagcaaaggttatctgtttcatggcgcggtcctgatacaaaacgggtcccgccatcatacttcacaaggacttcactttcagacaatagtcttttgccatcgtgatgaatgtgagtgaaaagatggaacatttcgacgtggcgattattggcctcggcccggcaggaagcgcgttggcacgaaagttagcaggcaaaatgcaggtgatcgcgctggataaaaagcaccagtgtggtactgaaggtttcagcaaaccctgcggcggtctgctggcaccggacgcgcagcgatcttttattcgcgatgggctgacgcttcctgtcgatgtgatcgctaatccgcagattttcagcgtcaaaaccgtcgacgtcgccgcaagcctcacgcgtaactaccagcgaagctatatcaatattaatcgccatgctttcgacttgtggatgaaaagcctgatccccgccagcgttgaggtttatcacgacagcctgtgccgaaaaatctggcgtgaggatgataaatggcatgtcatttttcgtgcagacggctgggagcaacatattaccgcccgctatctggtcggtgccgatggcgcaaacagcatggtgcggcgacatctctacccggatcatcaaatccgtaaatatgtcgctatccagcagtggttcgcggagaaacatccggtgccgttctactcctgcatctttgataatagcataactaactgttatagttggagtatcagcaaagacggttattttatctttggcggtgcctatccaatgaaagacggtcagacgcgtttcacgacgctgaaagagaaaatgagcgcctttcagttccagtttggtaagacggtgaaaagcgaaaaatgcacggtgctgtttcccagccgctggcaggattttgtctgcggtaaggacaacgcctttctgattggtgaagcggcgggatttatcagcgccagcagcctggaggggattagctatgcgctggatagcacagacattctgcgtagcgtgttactgaagcagccagagaagctcaataccgcttactggcgcgccacccgcaaactgcgtttaaaactcttcggcaagatagtaaaaagccgatgcctgaccgcaccggctttaagaaagtggattatgcgcagtggtgtggcacatattccacagttgaaggattaaccaacgcgcttcacatcgcccaccagcaggatataagagagcgcgccaatcaacgcgacggcggagatataaaccagtgcaggtgcgaaaccgtaaccctgcgccaggtaccccaccaccagcggaacggtgatgccgcccagaccaccggcgaagttaaacacgccgccggttaaaccaatcaggcgcatcggtgccagagaagaaaccaggctccaggtaatgctagcaaaaccgttaccgaagaatgccagcgccatcaggcacataatcatcatcggatcgttagtgtagttagcgcccataatgcaggtggagatcagcaagccgcagataatcggcgttttacgcgcaaagcccagactaaagcccttacgtaccagcagatccgctacccagccagagagcaggacgccgacaaacgccgcgaggaatggcaccgtggtcataaagcctgctttcagcgccgtgattcctttttcctgggttaaatagttcgggaaccaggttaagaaaaaccacagtgtagaagccaccgcaaattgcccaagataaacgccgatcagtttacgatggaacaccagtttccagtctttggctgttaacggctgacgcgcctctttcttcaccggcgcatcaccatccaccagaccgccgccatcacgaatgtaatccagttcagctttgctgatacctttggtcaggcgcggcggctgataaaccttaaaccaaatcaggctccagataatgccgataccaccagtgacaatgaacacccagtgccagctcaacatctcctgaatccagatcagcagcggcgtcagaaacgccagaccgacaaactgaccagacgtataaaaaccaacggcagaagcgcgttcatgttccgggaaccagctggtcaccatccggttattggtcgggaaagcaggcgcttcgaaaataccggttatcgcgcgcagaccaattaaactcattaagcccgtggcaaagccctggaataaagtcgccacactccagccaaatatcgcaataaaataagtcacgcgagaacctacgcgatctaaaaaccaaccgccggggatctgacatagcgtataaagccaggcgaaggcgctaaatacatagcccatttccgctttggtaatgccgaactcttcctgaatatgggcggaagccacggccaggttggcgcggtcgacataacaaatgactaccgtaataaagatcatcaccagcgtcagataacgccgacgccccggctttgctgcattaacgggaatatccatagcgagctttctccagattttgggcatagcgaagccgctcaccatgccctgtaatttacagagggttatatttttgtattgctgttttagtgcccgatgaggggcttacgtggcaggaattaccactctgctacgctgttatcttcatgacgccagagcggattacgccagtccggggcatttttactgaactcaatcactttagcttcgtcgatttccacgcctaagcccggtttcgttaacggtttaaagaagccgccgaccatgctgaagtcttctttgtttttcacaaagtcgagtaactccgcgcctttgttgtaatgaattcccatactttgttcctgaagtacggcgttataggaaacaaagtcgatatgcaggcaagccgccagtgcaatcggtccgagcggacagtgcggcgcaagggtcacgtcataggcttctgccattccggcgattttgtagcattcggtaataccgcccgcgtgggagagatccggttgcagaatgctaataccacctgcctccagcacgcgtttaaaatcgaagcgactgaacatgcgttcacccgccgccagtggaatatgcgtttgtgccgccagtttcgggtagtattcggcttgttccgccagcaccggctcctcaataaacagcgggcgatacggctccagttctttaatcagcactttcgccatcggcgcgctgacgcgaccgtggaaatcaagaccaaactcaatctgattgccaaaagcttcacgaatttgtgccacggtgttaaccgccgcatctaccgcgcgggagttatcaattagccccagttcttcacaaccgttcagtttgaaggtatcgaagccgatttcgcgtagcgttttaatgccgtcgataacatccgccggacgatcgccgccaacccaactgtaggctttaattttgtcgcgaaccaggccgcccatcagttgccagaccggcgcattcagcactttacctttgatatcccataacgcctggtcaatcccggcgatggcgctcatcaggatcggaccgccgcgatagaatccggcgcgatacatcacttgccataagtcattgatgcggcttggatcctgaccaatcaaatagtcacccagctcgtgaactgccgcttccaccgtacgggcgcggccttcgatcacgggctcgccccaaccgaccacgccttcatcggtttcaattttcaggaacatccagcggggaggtaaacgatacgtggtaattttggtgattttcattgcactgcctctcgatacgccttaacaaatgctgctgcctgctgcgcggtgcgctctacggattgcccggcgcgatagagatcgctgcctaagcccgcccctgcacaacctgcgtctatccactgcgccaggttttctggcgtcacgccgccaacggcaaagactgcgatgtcgcttggcaataccgcttttaacgctttgatgtattgcggaccaaaagcgctactcggaaatattttcagcgcctgcgcgcccgcttcgagcgcggtaaaggcttcggtcgccgtcgcgcagccggggcagacggtcatgccgtagcccaccgcacggcggatcacttcactatggatattgggcgtaacgatgagctgacagcccatcctggcgagcgcatcgacctgttcaggtttcagtaccgtacctgcgccaatcaacgccttgtcgccgtacgcatcaacgatggcgggaatgctttgctcccattgtggggaattcagcgggatttcaaccgcgtcgaacccggcgtcaatcaccgcgccaacatgcgccagcgcctcgtcgggcgtaataccgcgcaaaatggcgatcagcgggagtttagtttgccactgcatgagcgatgctccttataccagcctgaaatgccgtgtcgcccgccaccgccgtcacgtcgcaacccatcgcctgaaaggcttgctggtagcgcgcggtcaggcttgttccggcgacaagggtgatggcgtgttgatgggccacatagtcgcgcatactggcgacctctgcgccaatcaacaaaccagagagaaattcgctgacctgttcgcggggaagtgttcccagcacatggctggcgcgaacttcaaaaagctgcggcaatatggcgggcgtattaagaccacgctcaaggccagctgtgaaggcatcggcagagttttcctgcggcggcaaacctgcgccaatcaaactgtgatttaacagtaaatgatgtaattcaccggtcatcacggtgcgaaaatcgttgatttgctggctatcggcctgcacccatttgcaatgggttccgggcatgacataaagagaggaaggagccagagctcgcgcgccgatcaattgtgtttcttcgccgcgcatcacattgtggttatcgtcatgagagacacataatccgggaataatccagatattgtcgccaacactcgttaattgttcgccaatagagctaaaacaggcaggaacagataaatacggtgcaactttccagccgacgttgctgccaaccattcctgccattaccactggcgttttctcttcacgccagtcggtcgtgacttctgctaacaccgcagccggagattttccgttcaggcgcgtgacgcctgcttcactttgcctgctctccaggcagtggtcgccctgataaagccaggcgcgcagattggtgcttccccagtcaattgcgatgtagcgagctgtcatgtgatttcctttaaccttcgtgtgctgctggcgatcatggtaagcgccgcctgctctgccgcatcgccgtcctgatgtcgtatcgcatcgaacagcgccttatgttcctggagcgtttgcggcatgttggcctcatcgcccatccaggttcgttcaaaaaccgcccgctgcaggctactgatcgcaatgctaagttgctgtaacaccgggttatgcacgctctgcagcaccgcctcgtggtagcgaatatccgcttcgttaaacgcttcgcggtcctgattgttggcaatcatctcgttcagcgcgctttcaatctgcgccagatcgctggaagtcgcgcgctctgctgcccaacgggcaatcgccggttccaccagatttcgcacttcgctcatggcactgataagccgtgggtcgtagtcattttccagcacccattgcagtacgtcagtgtcgaggtaattccactggttacgcggtgccacaaacgccccgcgataacgtttcatttcaatcagccgcttcgccatcaggctacggaacacctcacggatgatgttgcggctggttgcaaactcctcacagagttccgcctcagccggaagcgggctgcctggcacgtatttgccgtgaacgatctgtttacccagcgtaatgacaatgcgatcggttttattgagagtcatggagagtccttgtgctctgtatgttcttctctactttaccccgatcgatgcataacgcggcaactttgtagtaccagcgtgatgacgttcgcgtttgccgtgcgtgtaatgtagtacaaacttatattgttgtactacaatttagatcacaaaaagaacaatgcataaaaaaatgacatgcgtcgggcagaaatctgaaaagggatatcaggcgctaaacaggagggaaagaagagtatgctttcaacggcttagctactcgtttaaaggattaatcatgaagttgaattttaagggattttttaaggctgccggtttattcccactggcgctgatgcttagtggctgtatcagctatgctctggtttcccataccgcaaagggtagtagtggaaagtatcaaagccagagtgacaccatcactgggctaagccaggcaaaagatagtaatggaacaaaaggctatgtttttgtaggggaaagcctggattaccttatcactgatggtgccgatgacatcgttaagatgctcaatgatccagcacttaaccggcacaatattcaggttgccgatgacgcaagatttgttttaaatgcggggaaaaagaaatttaccggcacaataagcctttactactactggaataacgaagaagaaaaggcactggcaacgcattatggttttgcctgtggtgttcaacactgtaccaggagtctggaaaacctaaaaggcacaatccatgagaaaaataaaaacatggattacagtaaggtgatggcgttctaccatccatttaaagtgcgattttatgaatactatagtcccagaggcattccggatggtgtttccgcagcattactgccagtgactgttacgctggacatcattactgcaccgctgcaatttctggttgtatatgcagtaaaccaataatcagtaagcgggcaaacgcgtttatgctgtttgcccgcccacagattaattcagcacatacttctcaatagcaaacgccacgccatcttcaaggttagatttggtgacaaagttcgccacttctttcacactaggaatagcgttatccatcgccacaccgacgcctgcatattcaatcattgcgatatcgttttcctgatcgccaatcgccatgatttcttccggtttaatacctaacacgtcggccagacttttcacccccgtacctttgttaacgcgtttatcgaggatttcgaggaagtacggcgcacttttcagcacggtatatttctctttcacttcctgcggaatacgcgcgatagcctggtcgaggatggcgggttcatcaatcatcatcactttcaggaactgggtattggggtccattttctccgcttcgcagaacaccagcggaatggtggcaacgaaggattcatgcaccgtgtagtagctgatatcacggttggcggtgtacagcgtggtgcggtccagggcgtggaaatgagaaccgacttcgcgagagagtttttccaggaaacgatagtcgtcatagctgagagcagtttgcgccacggtgctaccatcagcggccttctgtaccagcgcgccgttataagtaatgcagtagtcgcccggctgttccatatgcagctctttcaggtagttgtgcacacctgcatacgggcgacccgtcgttagcacgacattcacgccacgggcgcgagctgcggcaatcgcatttttaacggcgggactaatggtgtgatcgggcagcagaagggtgccatccatatcgatagcaatgagtttaatagccatgagttccccaggtagattggttcctgacccatgctaacgcgattccgctcaaaaatcagtacaacacccgagggaaaagggggatgcaacgcgcgttgcgtgctccctttttgcttagcggaagagtttccctttcagcagttccatgcctgcggaaagcagatcgttattggcttgtggactcacttcaccttgcggactgagcgcatcaataatcttcggcaattgttctgccagtaaactggaagctgtactggtatccacgccaagtttttgcccgagatcggacaccgcatttgtgccgagcgcgctttccagttgctcgccactaacgctttgattgccctgttgattactcagccaggtactgagaatggcccctaagccgccactttgcagtttttccagcagcacctgaatgccgccctgctcctcaacccaacttaaaatagcctgatatttccccgcatcgcctttcagaaaggcaccgacaacttcatcaaaaagccccatgataatcacctgtaaagcgttacgtgttgacccaaaaagtatagatttgcgggatgataattgcggattgcagaaataaaaagggcggagatgatctccgcccttttcttatagcttcttgccggatgcggcgtgaacgccttatccggcctacaaaatcatgaaaattcaatacattgcaagattttcgtaggcctgataagcgtagcgcatcaggcacgctcgcatggttagcgccattaaatatcgatattcgccgctttcagggcgttctcttcaataaacgcacggcgcggttcaacggcgtcgcccatcagcgtggtgaacaactggtcggcagcaatcgcatctttaacggtaacgcgcagcatacgacgactttccgggtccatagtggtttcccacagctgttccgggttcatctcgcccagacctttataacgctggatggagaggccgcgacgggactctttcaccagccagtccagcgcctgctcgaagctggctaccggctgacgacgctcgccacgttcgataaacgcatcttcttccagcaagccacgcagtttctcacccagcgtgcagatacgacgatattcgccaccggtgataaactcgtgatccagcggatagtcagtatccacaccgtgggtacgcacgcgaacaatcggctcgaacaggttttgctcagcattggtgtgaacatcaaacttccactggctgccgtgctgttctttgtcgttcagttcgctgaccagcgcgttcacccagcgggtaacggtctgctcatcagaaaggtcagcttccgtcaacgtcggctgatagataagctctttcagcattgctttcggataacgacgctccatacgattgatcattttctgcgtcgcgttgtactcagataccagtttctctaacgcttcgccagccaatgccggtgcactggcgttggtgtgcagcgttgcgccgtccagcgcgatagagatctggtactgatccatcgcttcgtcgtctttaatgtactgttcctgcttgcctttcttcactttgtacagcggcggctgagcgatgtagacgtgaccgcgttcaacgatttccggcatctgacgatagaagaaggtcaacagcagcgtacgaatgtggctgccgtcgacgtccgcatcggtcatgatgatgatgctgtgataacgcagtttgtccgggttgtactcgtcacgaccgataccacagccaagcgcggtgataagcgtcgccacttcctgagaagagagcatcttatcgaagcgcgctttctcgacgttgaggattttacccttcagcggcagaatcgcctggttcttgcggttacgcccctgcttcgcagagccgcccgcggagtccccttccaccaggtacagttcggaaagcgccggatcgcgttcctggcagtctgccagtttgcccggcaggcccgctaagtcgagcgcacctttacggcgggtcatttcacgcgcgcgacgcgccgcttcacgggcacgggcagcatcgataattttgccaaccacgattttcgcgtcggttgggttttccagcaggtattctgccagcagttcgttcatctgctgttcaaccgcgcttttcacctcagaagaaaccagtttgtctttggtctgggaggagaatttcgggtccggcactttcacggaaacgaccgcaatcaggccttcacgcgcatcgtcaccggtggcgctgactttggcttttttgctgtagccttctttgtccatgtaggcgttcagggtacgggtcatcgccgcacggaagcctgccaggtgagtaccgccgtcacgctgcggaatgttgttggtaaagcagtagatgttttcctggaagccatcgttccactgcaacgccacttcgacgccaataccgtctttttcagtggagaagtagaagatattcgggtggatcggcgttttgttcttgttcagatattcaacgaacgccttgatgccgccttcatagtggaagtggtcttctttgccgtcgcgcttgtcgcgcagacgaatggaaacgccggagttgaggaagctcaactcacgcagacgtttcgccagaatttcatattcgaactcggtcacattggtgaaggtttcgaggctgggccagaaacgcaccatggtgccggttttttcagtctcgccggtaaccgccagcggggcctgcggtacaccgtgttcgtagatctgacggtgaattttaccctcgcgctggataaccagctccagtttttggctcagggcgtttactacgctaacaccaacgccgtgcagaccgccggacactttataggagttatcgtcaaatttaccgcctgcgtgcagaacggtcatgatcacttccgccgcgcttacgccctcttccgggtgaataccggtcggaatgccgcgcccgtcatcctgtacagagacagagttatcggcgtgaatggtgacgataatttctttacagtgacccgcgagcgcttcgtcgatagcgttatctaccacctcgaataccatgtggtgcagaccggtgccgtcatccgtgtcgccgatatacatacccgggcgcttacgcaccgcatccagccctttcaggactttgatactggaggagtcataagaattgctcatcaacgtttctcgctcatttatacttgggttaatccgttattttacccttttccacggtaaacatcttgctattttcgtcgctcatgtctataacgtgttcagcactgatcgcgctgacaaagacctgactttgcgtcgcttttaagcggctggcaagcagcccgcgacgctcatcatcaagctcagaggcaaaatcatctatcaggtagagacaccgccgcccgctttcacgggtgaggaactctccttgcgccagacgtaaggcgcacatcaacagcttaagctgcccacggcttaaggtatcttccaccggcgcaccgtcggcgcgaatgcgtaagtccgctttgtgcgggccgtgcgcggtgtaggttagctggcgatcgcgttcaaaattacgttccagcacctcagcatattctgtctctttctcccagccgcgctggaaagagaaagtcagagaaaactcagggagaaattgcttacaggtatcagccatatcggccgcgataccggcgctatactccgcgcgccaggtgctgatttgctccgccagcgggatcagctctttatcccacgggcgtagctgttcgtaacgtgtcacctggcgcagcgccgcattgcgctgcttgagcaatcgcttgagattgctccaggcggtgaaaaatccgggttcgttgtgaaagcatccccagtcgaggaatgctcttctgtatttggggccgccgttgagtaaagtaaacccttctggcgttatcaactgcattggcatcaggtgcgccagttccgcgaccttatgcccgtctgtaccgtcgatgcggactttgctgtcgccctgtttgtctttggttaagccaatcgctgtctcgcgctcttcgccctgtaatcgcccgtggagaacaaacgcctcctgctcatggcgaatgacgcgaccaatctgcaaactgcgaaacgcccgaccatggccgagcgtatagatggcttccagcacgctggttttgccactgccgttggcgcctaccagaaagttaaagccgggagataaggcgagatccgcggtttcaatgttgcggaaatcgcggatcaacaagcgggtgagggacattacagtctcattggcatgacaacataagccgcgctctggctggccgcatcttcaatctgcacgctggaaacgctatcggtcagcatcatgcggacgttttcgcatttcagcgcgttcagaacatccagcacataactgacgttgaagccgatttccatctccgcaccgctataggtaacgtcgaggatctcttccgcttcttcctgttccgggttgttggcggtgattttcagctggttttcgctgacataaagacgtacgccgcggaatttctcgttagagagaatcgccgcgcgagcaaacgcctgcttgagcagatcgcagccagcttccagatgtttgtccgggttcttcggcagaacgcggcgataatccgggaagcgaccatccaccagtttggaggtgaagataaagtcgccaacgtgggcgcgaatgttgttgctgccaatctgtacgcgcagcggattgtcgccgccgtcgagcatacgcatcagttcaatcacgcctttacgcggtacgatcacgctatggcttggcaaagattgaccaattggcatactacagaccgccagacggtggccgtcggttgccacggtgcgcagttcttcaccttcggtttcaaacagcataccatttaagtaatagcgaacgtcctgatgcgccatagaaaactgggtcgcttcaatcagacgcttcatcgttgcctgcggcagggtaaattcgacttcactctgccagtcatcgaggttcgggaaatccgccgctggcagggtagacaggctaaaacggctacgcccggagcgtaccagcatccgttcaccttccagctgcacggcaatttccgcgccttcaggcagaccacggcagatatcaaagaatttgcgcgccggaacggtcgtcgctcctggctcgtgtggctgaaccagcgcaacacgtgccaccatttccatctcgagatcagtaccggtcaggctcaacgtaccgtcagcaacctgtaacagcagattaccgagaatcggtagcgtaggacgaccacctaacggaccgctcacctgttgtagcggttttaataaatgctcacgttctacggtaaatttcataggtttagctactcaatgttctgattaaattactaaaatcttctttgatatcgtggctctcttcacgcaactgctcgatcttacggcaggcatgaagcaccgtcgtgtggtcacggccaccaaacgcatcgccaatctccggcagactgtggttagtcagctctttcgccagcgccatcgccatctggcgcggacgcgccacgctgcgggatcgacgcttggaaaggagatccgcgactttgatcttgtagtactccgccaccgtcttctgaatattgtcgatggtgaccagtttttcctgcaatgccagcaagtcgcgcagcgcctcacgcacgaagtcgatggtgatcgcccgtccggtaaagttggcattggcaatgacgcggttcagcgccccttccagctcacgtacgttagatcgtagacgcttggcgataaagaacgccacttcgcccggcaaacgaatgtcgttttcgtcggcctttttcatcaggatcgccacacgggtttccagctctggcggttcgatcgccacagtcagtccccaaccgaagcgggatttcaaacgatcctcaacgccgttgatctctttcggatagcgatcgctggtgagaatgatctgttgattaccttccagcagggcgttgaaggtgtggaaaaactcttcctgagatcgttctttattagcaaaaaactgaatatcgtcgatcagcagtgcatctacggaacggtagtagcgtttaaactcttcgatcgcgttgttttgcagggctttaaccatgtcctgaacaaagcgctcggagtgcatataaaccactttggcattcggcttgcgcgccataatgccgttacccaccgcatgcagcaggtgagttttacccagacccgtgccgccataaaggaacaacgggttataggcaccgccagggttatccgccacctggcgagccgccgcgcgcgccagttggttagatttaccttcaacgaagttatcaaacgtgtgtttgacgtttacgttagaacgataggtcggttctgccggggccgggacgttatcccaaccactgcgcgtagaaggcgcagcacgttgcggctgcgtttgcgccacctgtgcaggggccgcgacgttgctcgtcactgccgcttgtggcgtttgcgtcaccggtttggtgccgacttcaaaacgcagctgtggggcatccgctccgcagaaactggttagcagtccattgatattattaaggtacttgtcccgtacccaatcgaggacaaaacggtttggcgcgtacagggccagcgtgttatcgctcagttccgcctgcaatgggcgtatccacatactgaattctgtggctggtaactcatcctgcaatcgggcaagacactgctgccaaaggctaagactcacggcggactccactcgaacaaaagtcgataatgactaaggctgaaacattcatgattgttgacgtacgtcgaaaagaccctgcttgagggtgacgcacgaaccgctgtctgcggttatatgcccgatcaagatcctgcaaaacgatcgggaccgcggatcatagcctaaactgcgcaagagatcttctgtttctcacagattttcccgatttatccacaggactttccagaactcgctaagtgtaaacgatcctgccgcgaggcgggcacgatttacgccgcatattggaaaatttaatgaccatagacaaaaattggcttaatcgatctaataaagatccaggacgatccttgcgctttacccatcagcccgtataatcctccacccggcgcgccatgctggtttccactggtgtgaggtcgtacattttccctgcgaaaaggtgcggaaaagcgcggtaaataaggaaagagaattgactccggagtgtacaattattacaatccggcctctttaatcacccatggcttcggtgtccatcgtttcatttttcggcggatatccaataaagccattgaatttattcaagtttaggtagaaatcgccatgaaacgcacttttcaaccgtctgtactgaagcgcaaccgttctcacggcttccgtgctcgtatggctactaaaaatggtcgtcaggttctggcacgtcgtcgtgctaaaggccgcgctcgtctgaccgtttctaagtaataaagctaacccctgagtggttaagctcgcatttcccagggagttacgcttgttaactcccagtcaattcacattcgtcttccagcagccacaacgggctggcacgccgcaaattaccattctcggccgcctgaatagcctggggcatccccgtatcggtcttacagtcgccaagaaaaacgttcgacgcgcccatgaacgcaatcggattaaacgtctgacgcgtgaaagcttccgtctgcgccaacatgaactcccggctatggatttcgtggtggtggcgaaaaaaggggttgccgacctcgataaccgtgctctcagcgaagcgttggaaaaattatggcgccgccactgtcgcctggctcgcgggtcctgacttaatcggaagcgttggaaaaattatggcgccgccactgagccctggcagccgggtcctgatagccctcattcgggtctatcaacgcctgattagtccgctactcgggccgcattgtcgtttcactccaacctgtagtagctacggaattgaggcattgcgcaggtttggagtgataaaaggcagttggttgacggtgaaacgcgtattaaaatgccaccctttacaccctggtggtgacgatcccgtcccgcccggaccatttgataccagagaacactaacgatggatagccaacgcaatcttttagtcatcgctttgctgttcgtgtctttcatgatctggcaagcctgggagcaggataaaaacccgcaacctcaggcccaacagaccacgcagacaacgaccaccgcagcgggtagcgccgccgaccagggcgtaccggccagtggccaggggaaactgatcagcgttaagaccgacgtgcttgatctgaccatcaacacccgtggtggtgatgttgagcaagctctgctgcctgcttacccgaaagagctgaactctacccagccgttccagctgttggaaactagtccgcagtttatttatcaggcacagagcggtctgaccggtcgtgatggcccggataacccggctaacggcccgcgtccgctgtataacgttgaaaaagacgcttatgtgctggctgaaggtcaaaacgaactgcaggtgccgatgacgtataccgacgcggcaggcaacacgtttaccaaaacgtttgtcctgaaacgtggtgattacgctgtcaacgtcaactacaacgtgcagaacgctggcgagaaaccgctggaaatctccagctttggtcagttgaagcaatccatcactctgccaccgcatctcgataccggaagcagcaacttcgcactgcacaccttccgtggcgcggcgtactccacgcctgacgagaagtatgagaaatacaagttcgataccattgccgataacgaaaacctgaacatctctagcaaaggtggttgggtggcgatgctgcaacagtatttcgcgacggcgtggatcccgcataacgacggtaccaacaacttctataccgctaatctgggtaacggcatcgccgctatcggctataaatctcagccggtactggttcagcctggtcagactggcgcgatgaacagcaccctgtgggttggcccggaaatccaggacaaaatggcagctgttgctccgcacctggatctgaccgttgattacggttggttgtggttcatctctcagccgctgttcaaactgctgaaatggatccatagctttgtgggtaactggggcttctccattatcatcatcacctttatcgttcgtggcatcatgtacccgctgaccaaagcgcagtacacctccatggcgaagatgcgtatgttgcagccgaagattcaggcaatgcgtgagcgtctgggcgatgacaaacagcgtatcagccaggaaatgatggcgctgtacaaagctgagaaggttaacccgctgggcggctgcttcccgctgctgatccagatgccaatcttcctggcgttgtactacatgctgatgggttccgttgaactgcgtcaggcaccgtttgcactgtggatccacgacctgagcgcacaggacccgtactacatcctgccgatcctgatgggcgtaacgatgttcttcattcagaagatgagcccgaccacagtgaccgacccgatgcagcagaagatcatgacctttatgccggtcatcttcaccgtgttcttcctgtggttcccgagtggtctggtgctgtactatatcgtcagcaacctggtaaccattattcagcagcagctgatttaccgtggtctggaaaaacgtggcctgcatagccgcgagaagaaaaaatcctgattcggtgagttttcgctaaaataagggcggtcagttgaccgccttttttcttttcgtagggcggataagcaccgcgcatccgccacacaaagcaacaggaacatcatgagcgataatgacactatcgtagcccaggccacgcctccgggacgtggcggcgttggcatcctgcgcatctccggcttcaaagcccgtgaagttgccgaaaccgtgctgggtaaactgcctaagccgcgctacgccgattatcttccgtttaaagacgccgacggcagcgtgctcgatcaggggattgcgctatggttccctggcccgaacagcttcaccggcgaagatgtgctggaactgcaaggtcatggcggtccggtgatcctcgacctgctgttaaaacgcattctgaccattcccggcctgcggattgctcgccctggtgagttttccgaacgcgcgtttcttaacgataaacttgacttagcccaggccgaggcgattgccgatcttatcgacgccagtagcgaacaggcggcccgtagcgcacttaacagcctgcaaggcgcattctccgcacgggttaatcatctggtagaagccctcacccacttgcgcatttacgtcgaagcggcaattgatttccccgatgaagagatcgatttcctctccgacggaaaaattgaagcccagctcaatgacgttattgccgatcttgatgcagtgcgtgctgaagcacgtcagggtagtttgttgcgcgaagggatgaaagtggtgattgccggacgtcctaacgccggtaaaagcagcctgttaaacgcgctggcggggcgtgaagcggcaatcgtaaccgatatcgccggaactacgcgtgacgtgctgcgtgagcatatccacattgacggaatgccgctgcatatcatcgataccgccgggctacgtgaagccagtgacgaagtagaacgtattggtatcgagcgcgcgtggcaggaaattgaacaggccgaccgcgtgctgtttatggtcgatggcaccacaacagacgccgtggatccggcagagatctggccggaatttattgcccgtctgccagcgaaactgccgatcaccgtggtgcgcaataaagccgatatcaccggcgaaacgctgggaatgagtgaagtgaacggtcacgcgttaattcgtctcagcgcaaggactggtgaaggcgtggacgtgctgcgtaaccatctcaaacagagcatgggctttgacaccaacatggaaggcggcttcctggcgcgtcgtcgccacctacaggcgctggaacaggcagcggaacatctacaacagggcaaagcgcaactgttgggagcctgggcaggtgaactgctggcggaagagttgcgtctggcacagcagaacttaagcgaaatcaccggggaatttactagtgacgacctgctggggcggattttctccagcttctgtattggtaagtaaccgcgcttacgaggccgcattctgactgtcagatgcggcttcgcttcattgttaccactcctgttattcctcaaccctttttttaaacattaaaattcttacgtaatttataatctttaaaaaaagcatttaatattgctccccgaacgattgtgattcgattcacatttaaacaatttcagaatagacaaaaactctgagtgtaataatgtagcctcgtgtcttgcgaggataagtgcattatgaatatcttacatatatgtgtgaccagtaaatggttcaatattgacaacaaaattgtcgatcaccgcccttgatttgcccttctgtagccatcaccagagccaaaccgattagattcaatgtgatctatttgtttgctatatcttaattttgccttttgcaaaggtcatctctcgtttatttacttgttttagtaaatgatggtgcttgcatatatatctggcgaattaatcggtatagcagatgtaatattcacagggatcactgtaattaaaataaatgaaggattatgtaatggaaaactttaaacatctccctgaaccgttccgcattcgtgttattgagccagtaaaacgtaccactcgcgcttatcgtgaagaggcaattattaaatccggtatgaacccgttcctgctggatagcgaagatgtttttatcgatttactgaccgacagcggcaccggggcggtgacgcagagcatgcaggctgcgatgatgcgcggcgacgaagcctacagcggcagtcgtagctactatgcgttagccgagagtgtgaaaaatatctttggttatcaatacaccattccgactcaccagggccgtggcgcagagcaaatctatattccggtactgattaaaaaacgcgagcaggaaaaaggcctggatcgcagcaaaatggtggcgttctctaactatttctttgataccacgcagggccatagccagatcaacggctgtaccgtgcgtaacgtctatatcaaagaagccttcgatacgggcgtgcgttacgactttaaaggcaactttgaccttgagggattagaacgcggtattgaagaagttggtccgaataacgtgccgtatatcgttgcaaccatcaccagtaactctgcaggtggtcagccggttagtctggcaaacttaaaagcgatgtacagcatcgcgaagaaatacgatattccggtggtaatggactccgcgcgctttgctgaaaacgcctatttcatcaagcagcgtgaagcagaatacaaagactggaccatcgagcagatcacccgcgaaacctacaaatatgccgatatgctggcgatgtccgccaagaaagatgcgatggtgccgatgggcggcctgctgtgcatgaaagacgacagcttctttgatgtgtacaccgagtgcagaaccctttgcgtggtgcaggaaggcttcccgacatatggcggcctggaaggcggcgcgatggagcgtctggcggtaggtctgtatgacggcatgaatctcgactggctggcttatcgtatcgcgcaggtacagtatctggtcgatggtctggaagagattggcgttgtctgccagcaggcgggcggtcacgcggcattcgttgatgccggtaaactgttgccgcatatcccggcagaccagttcccggcacaggcgctggcctgcgagctgtataaagtcgccggtatccgtgcggtagaaattggctctttcctgttaggccgcgatccgaaaaccggtaaacaactgccatgcccggctgaactgctgcgtttaaccattccgcgcgcaacatatactcaaacacatatggacttcattattgaagcctttaaacatgtgaaagagaacgcggcgaatattaaaggattaacctttacgtacgaaccgaaagtattgcgtcacttcaccgcaaaacttaaagaagtttaattaatactacagagtggctataaggatgttagccactctcttaccctacatcctcaataacaaaaatagccttcctctaaaggtggcatcatgactgatcaagctgaaaaaaagcactctgcattttggggtgttatggttatagcaggtacagtaattggtggaggtatgtttgctttacctgttgatcttgccggtgcctggtttttctggggtgcctttatccttatcattgcctggtttagtatgcttcattccgggttattgttattagaagcaaatttaaattatcccgtcggctccagttttaacaccatcaccaaagatttaatcggtaacacctggaacattatcagcggtattaccgttgccttcgttctctatatcctcacttatgcctatatctctgctaatggtgcgatcattagtgaaacgataagtatgaatttgggttatcacgctaatccacgtattgtcgggatctgcacagccattttcgttgccagcgtattgtggttaagtagcttagccgccagtcgtattaccagtttgttcctcgggctgaagattatctcctttgtgatcgtgtttggttcttttttcttccaggtcgattactccattctgcgcgacgccaccagctccactgcgggaacgtcttacttcccgtatatctttatggctttgccggtgtgtctggcgagttttggtttccacggcaatattcccagcctgattatttgctatggaaaacgcaaagataagttaatcaaaagcgtggtatttggtagcctgctggcgctggtgatttatctcttctggctctattgcaccatggggaatattccgcgagaaagctttaaggcgattatctccagtggcggcaacgttgatagcctggtgaaaagcttcctcggcaccaaacagcacggcattatcgagttttgcctgctggtgttctctaacttagctgttgccagtagcttctttggtgtcacgctggggttgttcgattatctggcggacctgtttaagattgataactcccacggcgggcgtttcaaaaccgtgctgttaaccttcctgccacctgcgttgttgtatctgatcttcccgaacggctttatttacgggatcggcggtgccgggctgtgcgccaccatctgggcggtcattattcccgcagtgcttgcaatcaaagctcgcaagaagtttcccaatcagatgttcacggtctggggcggcaatcttattccggcgattgtcattctctttggtataaccgtgattttgtgctggttcggcaacgtctttaacgtgttacctaaatttggctaaatccttcaagaagccagccattcgctggcttcttgcctctcaggaaatcacttatgtccaaatggcaactcgcctgatcctccttcaccacgtatgctttgcgtcaccttactatcaggacgctttagcccatgtcccgctttttgatttgtagttttgccctggttttactttatcccgccgggattgatatgtacctcgttggtttaccgcgcatcgccgccgatctcaatgccagcgaagcgcagttgcatattgcgttctccgtatatctggcggggatggcagctgcgatgttatttgccggtaaagtggccgatcgtagtgggagaaagccggtcgccatacccggcgcggcgctatttattattgccagcgtgttctgtagtctggctgaaaccagcacgttatttcttgcaggccgatttctacaggggttgggcgcaggctgttgttacgtagtggcgttcgctattttgcgcgacacgctggatgatcgacgtcgggctaaagtgctgagtttactcaacggtattacctgcatcattccggtgttagcgccagtgctcggacatctgattatgcttaaattcccgtggcagagtctgttctgggcgatggcaatgatgggcatcgcggtactgatgttgtctttgtttattttaaaagaaacgcgcccagcggcccccgcagctagcgataaaccacgagaaaatagcgagagcctgcttaaccgttttttcctcagccgtgttgttatcaccaccctcagcgttagcgtgatcctcactttcgtcaacacgagtccggtattgctgatggaaatcatggggtttgagcgcggtgaatacgccaccattatggcgctgaccgctggcgtcagcatgaccgttagtttctccacgccatttgcgctgggaatttttaagccacgtacgttgatgatcaccagccaggtgttattcctggcggcggggatcactcttgccgttagtccttcccatgcggtttctctgtttggtatcacgctgatttgcgccggtttcagcgtaggttttggtgtggcgatgagtcaggcgttagggccgtttagtttacgcgcgggcgtagccagcagcaccttaggtattgcgcaggtttgcggtagcagtctgtggatttggctggcagcggtggttggtatcggcgcatggaatatgctgatcgggattctgattgcctgtagcatagtgagcctgttgctgattatgttcgtcgcgcctggacgccccgttgccgctcatgaagaaatccatcaccacgcttgatctcaatctgctgctttgtctgcaactgctgatgcaggagcgcagcgtaaccaaagcggcgaagcggataaacgtgacacctagcgcggtgagtaagagcctggcaaagttaagagcgtggtttgacgacccgctctttgtgaacagtccgctgggtctgagccccacaccgctgatggtcagcatggagcaaaatctggcggagtggatgcaaatgagcaacctgctgctggataaaccgcaccaccagacaccgcgcggcctgaagtttgagctggcggcggaaagtccgctgatgatgatcatgcttaatgcgctgagcaaacagatctaccaacgttacccgcaggcgaccatcaaattacgtaactgggattacgattccttagatgccattactcgtggtgaagtggatatcggtttttccggtcgcgaaagccatcctcgcagccgggagctgttaagcagcctaccgttagccattgattatgaagtgctgtttagtgatgtgccctgcgtctggttacgcaaagatcatccggcactgcatcaaacgtggaatctggacaccttcttacgttatccgcatatcagcatttgctgggaacagagcgatacctgggcgctggacaatgtgttacaggagctgggacgcgaacgcacgattgctatgagcctgccggaattcgagcagagtctgtttatggcagcgcaacccgacaatctgctactggcgaccgcgccgcgctactgtcagtactacaatcaactccatcaactgccgttggttgctcttcctctcccgtttgacgaaagccagcaaaaaaagctggaagttccttttaccctgctgtggcataaacggaacagccataatccgaagatcgtctggttacgggaaaccattaaaaacctttacgcgagcatggcataaccgaatcgtatgaaacgcgacccaatttcacaataaaatgtaaaaaagttgtaataagcttgtctgaatcgaacttttagccgctttagtctgtccatcattccagtaaatgattactcttgtattcataatggaccattaagcatggagcgaaaaatggcgactcactttgcccgagggattttaacggaaggacatctgatttctgttcgtctcccctcccagtgtcatcaagaagcccgaaacattccccctcatcgtcaaagccgttttctggcgtccagaggtttactcgcagaactgatgttcatgctgtatggcattggcgaattgccggaaatcgtcaccctgccgaaaggtaaaccggttttcagtgataaaaatttgcctagcttttccatttcctatgccgggaatatggttggcgtggcgttaacaaccgaaggtgaatgtggcctcgatatggaactacagcgtgcgacgcgcgggtttcatagcccacacgcgcccgataaccacaccttttccagcaatgaaagcctatggatcagtaaacaaaacgatcctaacgaagcgcgggcgcagctcatcacgctgcgccgaagcgtgctaaaactaaccggtgatgttttgaatgacgatccgcgcgatctgcagctgctgcccattgccggacgcctgaaatgtgctcatgtaaatcatgtagaagcgttatgcgacgcggaagacgtgctggtgtggtccgtggcggtcacgcccacgattgaaaagctcagtgtctgggagttagatggcaaacacggctggaaaagcctgccggatattcacagccgcgccaacaatcctaccagccggatgatgcgttttgcccaactctctaccgtgaaggcttttagcccaaattgatagacaaccacaggagtcatcatgtctgaaaaattgcaggtggttacgttactggggagcctgcgcaaaggcagttttaatggcatggttgcacgtaccctgccgaaaattgctccggcgagcatggaagtcaatgcgttaccatccattgccgacattcccttgtatgacgctgacgtacagcaggaagaaggttttccagcaacggttgaagctctggcggaacagatccgtcaggctgacggtgtggtgatcgtcacgccggaatataactacagcgtaccgggtgggctgaaaaatgccatcgactggctttcccgcctgccggatcaaccgctggccggtaaaccggtattgattcagaccagcagtatgggcgtgattggcggcgcgcgctgtcagtatcacctgcgccagattctggttttcctcgatgcaatggtgatgaacaagccggaatttatgggcggcgtgattcagaacaaagttgatccgcaaaccggagaagtgattgatcagggtacgctggaccacctgaccgggcaattgaccgcatttggtgagtttattcagcgagttaagatctaaataaaaaacccgccagcaatcatgcatggcgggtttttaacgcgctatcgattttagtgagcgtcgataaagacaatcttcaggataaacagcagcgcaacgatgattacgcacgggcttagatcacgcagacgtccggtaccgattttcatcacgcagtaggagataaagcccagcgcgataccttcggtaatgctgaagctgaacggcatcatcacggcggtaataaacgccggaacagattcagtaagatcctgccagttcacgcgtgccagactggaagtcatcagcacgccaacgtaaatcagcgcaccagctgcagcgtagcctggcaccatccccgccagcgggctcagaaagataaccagcaggaacagcagaccaacaaccactgccgtcagaccggtacgaccgccaacgcttacgccggaagaggactcaatataagccgtaacggaagaagtaccgataaagctaccggtcacggaagagatactgtcgacatacagcgcctgcttcatgcgcgggaatttccccttctcatccgccagacctgctttatcggtcacgccaatcagcgtaccggaggagtcaaacaagttgaccaacatgaaagagaaaatcacccctgccagcccgaggttaaagctcccggctaaatctacatgacccacaactgtcattacgctcggcggcgcagaaacgatgccattgtagtgcacatcacccagcatccagcccagcagcgtcgtcaccacgatagaaaccagcaccgctgcgtgaatgttgcggctggccagaatagcaatgatgaagaagccgaggatacccagaagtacgctgtgagaagtcagattaccgatgctcaccagcgtttccgggttagcgacaatcacacctgcgtttttcagccccatcatgccaatgaacagaccgataccgctggtaatacccacacgcagactcaccggaatgttggctatcatccagtagcgaacgcggaaaatcgtcagtaacagcagacctatcgcgccccagaagattgcgcccatcccgacctgccacggcaagcccatcgcctgtacaacgacaaaagcgaagaacgcattcaggcccatagcgggtgccagtgcaactggcaggttagcaaacagtcccatcataatactgccgaatgcagcgatcagacaggtagtgacgaagacggcgctggtatccatgccagcaacgccaagaatttgcgggttaacaaaaacgatgtaaaccatcgtcaggaaggtggtaaaaccggcgatcacttcggtccgtgccgtcgtgccatgttcgcgcagtttaaacacgcgttccagcatcccctgaccagaagtctgggtggtatgttgatgactcattatctatttccgaacaaggagggaaaatccgtcgctatcgtataccaaaatgcgacaataggcgcgtttgtgagagacttttttattggatttacttatacggcaacgattgcgttgcgcaaatcggctctacgaaaacgttaaactgattaaaaaggaaaggcatgtcccggatagaagcggtatttttcgactgcgacggtacgctggtcgacagtgaagtcatttgctctcgcgcatatgtaacgatgtttcaggaatttggtattacgctcgatcctgaagaggtattcaaacgtttcaaaggtgtaaaactgtacgaaattatcgatattgtttcccttgaacatggtgttacgttagcgaaaacagaagctgaacacgtttaccgtgcagaagtcgctcggctgttcgatagtgaactggaagccatcgaaggggctggagcgctcctgagtgcgatcactgcgccaatgtgtgtggtatctaacggcccaaataacaaaatgcagcattctatgggcaagctgaatatgttgcactacttcccggataaactgttcagcggctacgatattcagcgctggaagccagacccggcgttaatgttccatgcggcaaaagcgatgaatgtaaatgtagaaaactgcattctggttgatgacagtgttgccggtgcacaatctggtatcgacgcaggtatggaagtgttctacttctgcgccgacccgcacaataagccgatcgttcacccgaaagtcaccacctttacccatcttagccagttacctgaactgtggaaagcgcgtggttgggatattacggcataattcttcacactcccttcacttaccccgcttaaattggcgctcaaaggtaagtaaagggagtttgatatgtctgttagtcgtcgggtaatacatcacggactttattttgcagttttaggaccgttaattggtgttctgtttcttgtcctctacatattcttcgcaaaagaaccgctggttctttgggtgataatacatccaatttttctcttattgagcataactacgggagctattcctgcgttgttaaccggtgtaatggttgcctgtctgccggaaaagatcgggagtcagaaacgttatcgttgtctggctggtggcataggtggcgtcgttatcaccgagatctattgtgcagttattgtacatattaagggcatggcttccagcgagttgtttgaaaacattctttctggtgacagtctcgttgtccgcatcattcctgcattgctggcaggtgtggtgatgagcagaatcattacccgtctacccggattggatattagttgtcctgaaacagactctttaagttaagcgggatactttatctttgggctactcaaaagcagacaggatgtttctatgactcaaaatatcaggccgttaccccaattcaaatatcatcccaagccactggaaacaggcgcatttgaacaggataaaaccgtagagtgcgattgctgtgaacaacagacgagtgtttattacagcggtcccttttattgcgttgatgaagttgaacatctctgtccgtggtgtattgcggacggttctgctgctgaaaagtttgcaggtagttttcaggatgatgccagcatagaaggtgttgaatttgagtatgatgaagaggacgaatttgccggtattaagaacacatatcctgatgaaatgctgaaagagttggttgaacgcacgccaggttatcatggatggcagcaggaattctggctcgcgcattgtggcgatttctgtgtttttatcggctatgtgggctggaatgatataaaagatcgcctcgatgaatttgccaaccttgaagaagattgtgagaatttcggtattagaaattctgatctagctaaatgcctgcaaaagggtggtcattgtcagggttatctcttccgctgtctccactgcggcaagctgagactgtggggtgattttagctaattatttaaataatgagaacaggccggagcgtaattcacacatccggccttatttcttaagcttaaccgagtgctaattctgcggcagcggctttatcagcgattaccatcaggctaggatgcagctgcaacacggaagctggaacatcttcggtaaccggaccttgcagaacatttttcagtgcctgcgctttacccgcgccgctgacaattatcagcaagtttttcgccgccatgatgcttttcggccccatcgtcacgtagctgtcaggcactaagctaaagtcgccgcccaactcgccatgcgccacaatatcaaccatctctccctggatcgggaactccacggtttgctcatggaaatgggtcgtattcggcaaattgccacaaaaatgaccatctgcacctaatcccagcaccaccaaatccagtccgccttcacgcgccagtttctgatcatgctcgcggtagttatcaatagtgagcttctggatattctcttctttgatccccgcaggggtgaaaaacagattacgcagattggtaatcgttacgccttctccctctttgccgcgaaatggaatttcatcaaaattatagaaatagcagttatcgtaccagggcttacctttaaccagggtggtgaggtattcatacatgcctttgggcgtgctaccggcggtaattgccaggttaacacgacgcgtcttgctcatataaccaagcagatggtgtgccgcgacacggctcatttcctggtaatcttcggtaatgattaatttcatcttaatgccttattttatttaaataatttctgtacaaaggctgcataggctggtcgccagacatccatttcatggttcagacccggatattcctggtaatcaaagttaatttttttctgctcaagctcagttttcagcccggcgatatccttgccggttacgacatctttatcccccacaaccacagtaaaattacgtagttgctggttgatagctgccggatcgttcagtcgggccgcgacaccttcatccggtacggttgtcgtggtaacaccactgaatgtggccagccagccaaagctttccagatgattcattccggaaaccagcgcctggtacccgccttgactaagccctgccagcgcgcggccatcggcatctttacggacattaaaacgcttgctaatcagcgggataatatcgttcatcagttcgcgatctgccgctttagcattcagcggataaaagactttacgtctttcctgaggcacgaaatcttcgggaataatgcccttcgcatcggtttctgtatccgggatcaccaccagcatcggtttaattttcccttcagcaagcaggttatccatgatttgcgggatacgcccctgatcgatagcggaacgtccggtatcaccaaagccgtgatagaaatagagcactggcaaaggctcgcccatgccggtgtatcctggcggggtccagacatacatctgacgttcagattgcaatgcgttggagtggtaagttatggcgatcaaatcaccatgcgcaacagaacgcgtatccagataactgcctggcaccagaatcatactggagttaacctggcgctgaggattagtcattgcggtgcctgtatcaatgctgcgtacaccatcaacattgaaaaaatactcgtacaggttgcctttcaggataggtgtgcgccagctccagactcctgcttcgtctttggtcatcgggtgaatattgtccggaaccggaacacccaccactacagagacattttttgccccaggggcaaagtagcgaaaggtcacgctgttatcggcattgacctgagtcacatactgtttcaccgggatagtgggtgccgggctggctggcatatccgctgctatggcccactgagcagaaataccgctggcaatagccagcgttaaagcagcaatttttatattcatcgtaatattcctttcattaagttccattaccaccagatttcagcctgggcaccgacagcaaactggtcgtctttattgtcttcaaaggtgaagccatccagttcgttttccagggctttgatatacgtggcgtagaaacgaatttccggacggctggtcaacatactggtattgactttaaaggtatggaagagcgtggttttataaccagactcattaaatttattactattcgcatctttgttttgctgggtgaaatagcccagttcaacacctgtctggttatattggtcccaaatataggccgggcgaacaaccgcacgaatagattcgaaatcagagtgggcgcctgtttcgtagctatatatatcgttaccgaaggagtaaacaatcgcgttagctacaatgaaatgatcgccaatataggcttcgccctggctagtcagacgtaccgctgttccgccggtgtgatcaccataataacgaccattaaaggtggtaaatggacttgcgccagcataacggccaaagttactggcgatagagttattcgcgaccaggaaggagaattcgttgaagccacctttatcaaatttctgcgttaaagatgtgccaaacatccaggtatctttccagtcataatacccgttattatcctgattatctttttcgcttgcgctttcgtttgccgtgacataacgaccacttaccattaaggtggctttatcccataacgggatatctttatagcgtaaatcaatggtattggtattaatctgctgtttgttttgcaggctgcgatcgtaatcatcgacatcttcgcgaaccagcgcgatatcaattttacccggaccgactttccagttttccagacctacacccgctgcggcatcagtacgctgcgttttccagtcaagcatctggatttcaattttcggcgcaccgtgtttacccacccagaaatcagcctctggcgcaaagggcaggaaacctttggtggtaacgtacatatcggagaactgcatatagttctcgccaccggcgttatcgccaaaccagccggtagagtactgctgaccaacgttaccatccatcatcacaacggcatcaacccgtttgccgttttcgttgtagacacgttgttttaactgcaaatcaaaccagccggagtattcgttaccaaagcggcccagagaaccaatcgcccaacttttaggactaccatgagaggcggtcccccaaccagaacggtaatagccgttgtaactaaagccaatttcatctttcacaaatttactgaaatctttcagagtcatggaagaataaatgctgcctgtctcactggcatttttctcttcatttttgaccagtacagcatcaggttttgcggcactactggtcgggaacggattggcggcatacccttgatcattcgtacttacgctacgattcaccgtcgctggcgtatactttttcttctcttcatctttatactttttgagttcgctttgcgtttctcttaacgccttttctaataactcaaggcgttgttccaccgttaaactttcagccaaactttgtgcagaaaaggctaacggtgccattaataagatggcagaggtaataagatttcgtctaaacataatatccctttatggtgcaaagaaagaattaacgcatcgcatccagactgttctgaatgcgacgataattaaggtgctttaatggttattttttttaaactcagcccccgcgtcttgatcacctctgcataccatccgaagcttttcttgcgtgttcttgtgaggcttccttcgccattatcatcacgatccacataaataaagccgtagcgcttagacatttgactatgagatgcactgactaaatcaattggcccccaactggtgtaccccataatatccacaccatcggcaatcgcttcatttacctgtaccaggtgatcgtttaaataggcaattcgataatcgtcctgtatgctaccatccgcttcaacgctgtcttttgcgcctaatccgttctcgacaataaataacggtttttgataacgatcccaaagcgtatttaacagaacccgtaatccaaccggatcaatttgccacccccactcactacttttcagatgcggattggggatcatattcagtatgttgccctgcgcatttttattaatgctttcgtcgtgggaaacacaaccagtcatgtaataactaaaagagatgaaatcgacggtatgttttaaatcttctgcgtcactttcagtcatctcaatggtgatattgtggtcgcggaagaaacgctgcatatagccgggatactggccacgcgcctgaacatcaccaaagaacatccagcgccggttctcttccatggcctgcaacatatcctgtggctggcaggtgagggggtaaaccagcccaccgagaagcatattgccgattttcgcttcggggagcaggctatgacaggctttaactgcccgcgcactggcaaccagttgatggtggatagcctgataaacttccgcctcgccactctcttctgccagccccacgcccgtgaatggcgcgtgtaagctcatgttgatttcattaaacgtcagccataacgccactttatgttggtagcgagtaaagaccgtgcgggcgtaatgctcgaagtgatcgatgaccgctcgattagcccaaccgccgtagtttttcaccagcccatatggcatttcgtaatgggataacgttaccagcggcttgatccccgcctgcgccatttcatcaaacagccgatcgtaaaacgctaaccccgcttcattcggttcgacttcgtcgccctgagggaaaattcgcgcccaggcaatggaaatacgcagacaggtgaagcccatctcggcaaataacgcgatatcttccgggtaacggtgataaaaatcgatggcgacatctttgatattctctttccccaggatgcgcggttccatttttcccattacgccatgaggctgtaaatcactggtgctgatccctttgccatcttcctgccaggcaccttccacctgattggcagctgttgcgccaccccaaagaaatgtttctggaaatgctttcataattaactccttttatcgttagcgaatgatggataacagcggttcacctgcgcttatctgcgccgtgccgtggggtaatacgtccgtaaaatcatcgctattactgattaataccggcgtcgtcagatcaaatccggcctcgcgaatagcagggatatcaaaagaaatcagccgatcgcctgtattgaccttgtcacccacgttgacgtgagcggaaaagaatttgccgtccagttttacggtgtcgataccgacatgaatcaggatctccacaccatcatcactctcaatgccaatggcgtgtaatgtggcgaacaagctagcaattcgacccgcaaccggagaacgcacttcaccaacgctgggcagaatggcaatacctttacccaacaggccactggcaaacgtggtatcagcgacgtgaatgagcggcacaatctctcccgtcatcggactacagataccgccctgctcaggtggtgtaataacctctggtgttttctcttgcggggcaccctgcgctggctgacgtttagcggtgatgaaatgaagcatcaccgtaccgacaaatgcgcaaccgatggcaatgacaccgccaataacgctggcccagacggtgaaatcaattcccgtactcgggatggtttgcatgaaggtgaaaatacttggcaaaccaaaggagtagactttcgtttgcgcgtagccaataatggtggccccccaaagccccactgatacaggcgataacaaaggggtacttacgcggcaggttgacgccatataccgctggttcggtgataccaaacagactcgtcaacgccgcacttcccgccaccacttttttctgcgcatcgcgttcgcagaggaagacgccgagcgccgccccgacctgcgccataatggcgggcattaacagcgggatcatggtgtcgtagcccagcacggtgaagttattgatacacagcggcaccaggccccagtgcagtccgaacatgacgaagatttgccagaagccgcccattaccgcgcccgcaaatgcaggaaccgcctgataaagccagagataaccggcggcaatcagttcgcttatccaggtacttagcggccccaccagcagaaaggtgacgggtgtgataaccatcagacatagcaatggtgtgaagaaatttttgattgcgctcggtaaccacgcattaagtcggcgttccagaatgctgcacaaccaggcagaaaaaataatgggaataacgctactgctgtaattcaacaatgtgaccggaatacccaggaaatccagccccagcgcatccgctttttgcccgttctcgaaagcagtcagaattaatggatgcactaacgctccaccaatcaccatggcagtaaatggattaccgccgaagcgtttccccgcggtgtatcccaggattatcgggaagaaccaaaacaaggcatcactggcgctgaataaaattaaataagtaccactttgttcggtcgtccactgaaaagtgagcgccagagccagcatacctttcaagatcccggttgccgccatcaaaccgatcagaggcgtaaaaataccactaataacataaacaaagcggtttagcagattacctttatcatcattttccggtgcctgttgcgctttttcgtcaaggcctgccacactgttaaccgccaggaagacatcggccacatggttacctatgaccacctgaaactggccaccgctttccaccaccataataataccgggggtctttttcagtacctctgcttgcgctttgctttcatcctttaatttaaaacgtaatcgcgttgcgcaatgcatcagactcacaatgttatctgcgcccccgactcctgcgactatttttctggctaactccgtcataacttgccctctaccgctttgcggcaaaactccaaaaaaaaacctgaaaaaaacggcctgacgtgaatcaagcaatttttttcaggttttgcccgcttagtgcggtaacaatcctttactcagtaataatatttcagtgttctttgcgcacgcgctctatatttatggctaaaaacataatctctgcgggactaattttacgttgatactgcaaaccaataaaaatggcgatccgttccgcacattgccatgcttgcgggtaattttgttttactgcttgttgtaaactttcatcactatcgttaatactagcatgttcaagaatacgccaggataaaaacttcagatgtgtaaccagtcgctgataactcaagctttcttcctggtaattaaggctgaactgaaattttattaattgcagcatttcgcgcattaactgcgtgacacctgcaacatcctccatatttccgctcatttgggcactgaccagatgcatggcaataaagcccacttcatctttcggtaactgcacgcccaaccgtttatcaataatggttaacgcttcttcccctagctggaactctttcgggtaaagccgctggatatcccacagcaacgggttgggcagcaacacgttttgctgaaagcgtttaatcgcaaactggcaatggtcagttaggctgatataaatactgtcctgtaattttcccaagcgctcctgcgctaaagagataatacgatcacaggttgccatcacctcaagaggaatatgacttaagagttcgcttaatcgcccgttcagttcatgactgctcaaggcatactctttttctattccactactgttaattctttcgccagcgcgtttttgaaagccaattccgcgccccatgacgactttttcccgctgttgatcatcaataaccaccacaacattattgttgagaattttggtgatttgcatgttcatagcaaggaccttttttataaacaaaaaaacccgacttcaccagtattctctggttatgtcaggttttgcctgcgaatgcagtaacaatccagtcatttattaatggtttttataacgaacatccaggttcggaaattaatttaattgcgtgcagagaaaatagcaatgcgctattgataaaaatatgaccatgctcgcagttattaactttgtgtaattttaggaatttataaagttatatataacaaatcccaataattaagttattgggatttgtctggtgaattatttgtcgctatctttccccgccagcagtttatccagctcatcgccaccgacgtgacggaaatcctgccccttcacgtagtagaagataaactcacaaatattctggcagcggtcgccaatacgttcgatagaacgcgcgcagaacagcgcagtaagtacgctcggaatggtacggctatcttccatcatgtaggtcatcagttgacgaacaataccttcgtattcctgatcgacttttttatcttcacgataaatacgtaccgcttcgtcaatgtccatccgcgcgaacgcgtccagcacgtcgtgcagcatctggatggtatgacggcccaggctctccagacttaccagcaacggctgatgctgctgggagaatttctccagcgcagtacggcagattttgtccgccacgtcgccaatacgctccagctcggcaatggttttactgatcaccataaccagtcgcaggtcgctcgccgtcggctgacgtttggcgataatgcgcacgcaggcttcatcgatcgccacttccatcatgttgacgttcttgtcgccttcgatgacgcgcttcgccagatcgctgtcctggttatgcatcgcggtgattgcatcagaaagctgctgctccaccatgccgcccatggtcatcacctgcgtgcggatactttccagttcggcgttgaactggccggaaatatgtttattaagattgagactgtccataacgcactcctgaatcaaccgtaacgaccggtgatgtagtcttctgtttgtttcttcgctggcttggtgaacagatcgtccgtgttgctgaactcaatcaattcgcccaggtacataaacgccgtgtggtcggaacaacgcgcagcctgctgcatgttgtgggtgacgatcaccacggtgtaatcctgcttcagttcggtgatcagctcttcaatacgcccggtagagatagggtcgagcgcgctacacggttcgtcgagcagcagcacttccgggcgaatggcgataccacgcgcaatacacagacgctgttgctgaccaccagagagagagtaaccgctctggtgcaatttatctttggtttcgttccacaatgcggctttggtcaatgcccactgcacgcgctcgtccatgtcggcacgggagagcttctcaaacagacgaacgccaaaagcgatgttgtcgtagatggacatcggaaacggcgtcggtttctggaacaccatgcccactttcgcacgcagcagtgcgatatcctgagagttggtcaggatgttgtcgccatcaagcagaatttcaccttccgcacgctgctccgggtacagttcaaacattttgttgaaggtacgcagcagcgtgcttttaccgcagccggacggcccgataaacgccgttacctggtttttagcgatatccaggttgatgtttttcagggcatggaatttgccgtagtagaagttcaaattacgaacctgaattttactcggggcagtttcaaccatactcattgcaatcttttcctcatcgtgcctgatgcacttcgctaatcaggcttaccgtaggccggatcaggcgttcacgccgcatccggcaaagtgttaaccgtgtacagagtcaaaaaggcgctcggtcggtcccctcgcccctctggggagagggttagggtgaggggaaaaccgtgtcagcaatatcaaccgtgtttattcttcgcaaaaacaacgcgcgccagaatgttcagcagcagtacgcacagggtaatgatcaataccccggcccaggccaattgctgccattccgcaaacgggctcatcgcaaacttaaagatcgtcaccggcaggttggcgatcggctgcatcatgtccgtgctccagaactggttggagagcgcggtaaacagcagcggcgcggtttcaccagcaatacgggcaatcgccagcaggataccggtcataatcccggacacgctcgctttcagcgtaatcgcagagatcatcttccacttcggtgtacccagcgcataagccgcttcacgcaggctgtacggcaccagtttcagcatgttctcggtggtgcggataacaatcggcacctgcaacaacgccagggcaatcacgcccgcccagccggagaagtgctccatctgcgccaccacaatggtgtaaacaaacagaccaaccacaatgctcggcgcagagagcagaatgtcgttaatgaagcgaatcacttctgccagccaggatttacgaccatattccgccagataaatccccgccataatgcccagcggcgtaccgaataccgtggcccacaaaattaacagcccgctacccgccagagcgttcgccagaccaccaccttccgtattgggcggcggcgtcatttcagtgaacagcgccaggctcataccgtcgataccgcgagtgatggtggacattaaaatccagatcagccagaacaggccgaaggccatcgtcgccatgctgagcgtcagcgcaatacggtttttgaggcggcgacgcgcctgcattttgcggcgagattcagccagcgccgcagtggtttgcatttcaaccatagccattagcgtgccccctcattcttagccaggcgcataatcataaacttgcttgcggcgaggacgatgaaggtaatcacaaacaggatcaggcccagttccatcagtgcggcaacgtgcagaccggattccgcttccgcaaattcgttcgccagcgcagaggtgatactgttgcccggcatatacaggctggcgctgtcgagctggtaggtgttaccgatgataaaggtcaccgccatggtttcaccgagcgcgcggcccagccccagcatgatgccgccgataacaccatttttggtgaacggaagaacgatacgccagataacttcccaggtggtgcagccaataccgtaggcgctctctttcatcatcaccggggtttgttcgaacacatcacgcattaccgccgcaatgtacggaataatcatgatggcgaggatcacgcctgccgcgaggataccgataccaaatgcggggccagagaacagcgcgccaacaatcgggatattgctcatgatattgccgaccggctcctgaaagtaaacggcgaacagcggcgcaaagataaacaggccccacatgccgtaaacgatacttggaatggctgccagcagctcaatggcgatacccagcgggcgtttcagccagccaggcgcaagctcagtcaggaacagggcgataccgaaactcaccgggacggcgatcagcagcgcgataaagctagtcaccaacgtaccgtagatcggcaccagcgccccgtagatatcgttcggtgcatcccactctttggtccataggaaagccagaccaaatttctgaatgctcggccaggaggagatgatcagagagacaataatgccacccaacatcaatagcacaatcagcgccgccagttttaccagcacgctgaaaattatgtcgccctttttacccggtgggttaaaagcaggcttggttgcagccataagttactcttcagttaaacgcgtttacaaagtcattttgtaatgccggatgcggcgtaaaacaccgtacccggcctggagttttattagtacagcggcttaccgctactgtctttaatattggtcttccacgcagcgcgaacctgttcaactacactatccggcaggctggcgtaatccaggtcgttcgcctgtttagccccggttttgtacgcccagtcgaagaatttcagcacttctgtgccttgttctggtttcttctgatctttgtggatcagaatgaacgtggtagaggtaataggccatgcatcttcgcctttctggttggtcagatcctgagcgaaggttttgctccagtctgcaccttttgctgcattagcgaagttttcttcggtcggactaaccggtttaccatcagcggagatcagtttggtgtacgccaggttgttctgcttcgcgtaagcatattcaacataaccaattgcacccggcagacgctgaacgaacgcggcgataccgtcgttacctttaccgcccagaccgatcggccattttacggtagagccagtaccaacgttgtttttccactcttcgttcactttcgccaggtagctggtgaagacgaaggaagtcccggagccatctgcgcggcgtactacagcaatgttttgactaggcagtttcagacccggattcagtttggcgatggcttcatcatcccacttcttgattttgcccaggtagatgtcgccgagggttttaccatccagcaccagttcgccagacttcagccctggaatgttaaccgccagcaccacgccgccaatcacggtcgggaactggaacagaccttcctgagccagtttttcgtcagacagcggcgcgtcagaggcaccaaaatcaacggtattagcgataatctgttttacgccaccggaagaaccgataccctggtagttaactttattaccggtttctttctggtaagtgtcagcccatttggcatacaccggcgcagggaaggttgcacctgcacctgtcaggcttgcttctgcaaacacagagaaagcactcatgcttaaggtcgcggcgacaacagttgcgacggtggtacgcataactttcataatgtctcctgggaggattcataaagcattgtttgttggctacgagaagcaaaataggacaaacaggtgacagttatatgtaaggaatatgacagttttatgacagagagataaagtcttcagtctgatttaaataagcgttgatattcagtcaattacaaacattaataacgaagagatgacagaaaaattttcattctgtgacagagaaaaagtagccgaagatgacggtttgtcacatggagttggcaggatgtttgattaaaaacataacaggaagaaaaatgccccgcttacgcagggcatccatttattactcaaccgtaacgctttttgccaggttacgcggctggtcaacgtcggtgcctttgatcagcgcgacatggtaagccagcagctgcagcggaacggtgtagaagatcggtgcaatcacctcttccacatgcggcatctcgatgatgtgcatgttatcgctacttacaaaacccgcatcctgatcggcgaagacatacaactgaccgccacgcgcgcgaacttcttcaatgttggatttcagtttttccagcaattcgttgttcggtgcaacaacaataaccggcatatcggcatcaattagcgccagcggaccgtgtttcagttcgccagcagcgtaggcttcagcgtgaatgtaagagatctctttcaacttcaatgcgccttccagcgcgattgggtactgatcgccacggcccaggaacagcgcgtgatgtttgtcagagaaatcttctgccagcgcttcaatgcgtttgtcctgagacagcatctgctcaatacggctcggcagcgcctgcagaccatgcacgatgtcatgttcaatggaggcatccagacctttcaggcgagacagcttcgccaccagcatcaacagcacagttaactgagtggtgaatgctttagtggatgccacgccgatttctgtacccgcgttggtcattagcgccagatcggattcgcgcaccagagaagaacccggaacgttacagattgccagactaccaaggtaacccagctctttgctcagacgcaggccagccagggtatccgcggtttcgccagactgactcaaggtgatcatcaggctgttacgacgcacggcagatttgcgatagcggaattcagaggcgatttcgacgtcgcacggaatacctgctaggctttcaaaccagtagcgggaaaccataccggagttataagaagtaccacaggcgaggatctgaatatgctcaaccttgctcagcagttcgtcggcgttcggtcccagctcgcttaaatcaacctgaccgtggctgatgcgtccggtaagggtgtttttgatcgcgttcggctgttcgtagatctctttctgcatgtagtgacggtaaatgcctttatcgcccgcgtcatattgcagattggattcgatatcctgacgttttacttccgcgccagttttatcgaagatgtttacgctacggcgagtgatttccgcaatatcgccctcttcaaggaagataaagcgacgggtcaccggcaacagcgccagctggtcagaagcgataaagttttcgcccatccccaggccaatcaccagcggactaccagaacgtgccgccagcagggtatccgggtgacgggagtccatgatcactgtaccgtacgcaccacgcagctgcgggatagcacgcagaacggcctcacgcagagtcccgccttgtttcagctcccagttcaccagatgggcaatcacttcggtgtcggtttcagaaacgaaggtatagccacgcgcttttagctcttcacgcagcggttcatggttttcgatgatgccgttatgcaccaccacaatgtgttcagaaacatgcggatgcgcattcacttcactaggttcaccgtgggtcgcccagcgagtgtgagcaataccagtgccgccatgcagaggatgttcttccgctgcctgtgccagcatctggactttaccgaggcgacgcaggcgggtcatatgaccttctgcatcaacaacggccagaccggcagagtcatatccgcggtattccagacgacgtaaaccttcaagaaggatttctgctacatcacgttgcgcgatcgcgccaacaattccacacatagtttttgattccgatttatatcgttgtcggtcaacctgtatgcccgttttttcgggcgccccgagccttgtagagagtggggttatttttatagttactgcttgtgggagggagattatgttatctcctcatcccatgtgaccgggttagccggccagaatcactttttctttaccggacgacgccagccttctttctgagtctgcggcacacggctgatagctaatgcattttcgccgacattacgcgtcacagttgtacccgcagcaatggtcgcgcctttgcctactgttaccggggccaccagctgagtgtcggaaccaacaaacacatcgtcgccgataatggtcttaaatttattcgcaccatcgtagttgcaggtaatggttcccgcgccgatgttaacgttatcgccaatttccgcatcgcccaggtaagtcagatgaccagctttgctgcctttacccagacgcgcttttttcatctcaacgaagttaccgacgtgagcaccttccagcaactcagcaccaggacgcaaacgggcaaacgggccaatggtacaggccgctgccagattcgcatcttccacaacggtatacggactgatttcgcaatcatcgccaatcacgctgtttttaatcacgcaaccggtgccaattttcacgcgatgaccgagagtcacgttgccctcgatgataacgttagtatcaatttcaacatcgcgcccgtgagttagcgtaccacgcagatcaaaacgcgctggatcgcgcagcataacgcctgctaacagcagtttttcagcctgttcggactgataaacacgctccagacgggagagttgcaggcggttattcacgccttctacttcgcttaaacgttgcggatgaacggcgacgatttcacgcccttcctgatacgccagcgcaataatgtcggtgatgtagtattcgccctgagcattattgttggtcagcttcgccagccagcgtttcatatctgcgccgttggcaatcagaatgccggtgttgatctcctgaatctgacgctgctcgtcggtggcatctttgtgctcaacaatgccggtaactttgccgttttcacgggtgatacgtccataaccggtcggatcatccagtttcaccgtcagcagaccaatgccaccctgcggtttagcatcacgcagacgctggagtgtttcgacagagatcagcggcacgtcgccgtagagcattaaaatgtcttcatcatcggcaaagaaaggtgcggcctgctgcattgcatgacccgtacccagctgctctgcctgaagcacccagttaaggttgtcgtctttcagcgcctgttttagcagatcgccgccgtgaccgtacaccaggtgaacgtgcgctgcgcctaattcattcgcagcatcaatgacatgctgaaccatcgctttcccggcaagggtatgcagcactttcggaagatcggaatacatgcgcgtgcctttgcctgcggcaaggatcactacgctcatagcattattcaacatacgcgtcctgactgtaatttgagaacgaatttaaaccgcttcaccttgaaaaaactacatttttttcatcgtgaaatggacagaggataaattgttcaataacggattatccccgctgacgaaagcgccattttcgaccatcgtcacgccttttgtctgcagaaaattaaggcagtaccttaatttaagcgtcaggtggatgtttttgctcttatttcgatcaatgaataaacaggaaaacaggggggttttatatcagcaggatctatgtgaacgctattcaggacgggtcacacgcgcaaaaaaaagccagcctgtttccagactggcttttgtgcttttcaagccggtgttacatcgcttttttggtcaactcgataacgcgcagctgcgcgatcgctttggccagttccgcagacgcctgagcgtaatctacgtcgccgtgagagctgctaatgtgctcttcagccttacgtttcgcttccatggctcgcgcttcgtcgagatcctggccgcgaattgcggtgtcggccagaacggtcacgttgccaggctgcacttcaagaatgccgccagacagatagataaactcttcgtgaccgtgctgtttcacgatgcgaatcataccaggcttaatggcggtgagcagcggtgcgtggccagggtagatccccagttcaccttcgctacccgttacctggattttctcgaccagaccagagaacatttgttgctctgcgctgacgacgtccaggtggtaagtcattgccatatcaccctccgattaaggcgttaaagttttttggctttttccacagcttcttcgatggaaccgaccatgtagaacgcctgctccggcaggtgatcgtattcgccttccatgatgcctttaaagccacggatggtgtctttcagggagacgtatttacccggagaaccggtgaatacttctgccacgaagaacggctgggacaggaagcgctggatcttacgagcacgcgctaccaccagtttgtcttcttcagacagttcatccatacccaggatggcgatgatgtctttcagttcctgataacgttgcaggatggactgaacgccacgcgcggtgtcgtagtgttcctgaccaaccaccagcgggtccagctgacggctggtggagtccagcgggtcaacggccgggtagatacccagagacgcgatctgacggctcagtaccacggttgcgtcaaggtgcgcaaaggtggttgccggagacgggtcagtcaagtcatccgcaggtacgtatactgcctgtacggaggtgatagaaccagttttggtggaggtgatacgttcctgcagaacgcccatctcttccgccagggtcggctgataacctaccgcactaggcatacggcccagcagtgcggatacttccgtaccggccagggtgtaacgatagatgttgtcaacgaacagcagaacgtcacgaccttcgtcacggaatttctcagccatggtcagaccggtcagagcaacgcgcagacggtttcccggcggctcgttcatctggccatacaccagggatactttgtcgataacgttggagtcggtcatttcgtggtagaagtcgttaccctcacgagtacgttcacctacgcccgcaaacacagagtaaccggagtgctcgatcgcgatgttacgaatgagctccatcatgtttacggttttacctacacccgcaccaccgaacagaccaactttaccgcccttagcgaacggacacatcaggtcgataactttgataccggtttccagcagttcctgagagttactcagctcttcgtaggaaggtgctgcgcggtgaatcgcccaacgctcttcttcaccgatctcgcctttcatgtcgaccggttcacccagtacgttcatgatacggcccagagtcgctttacctaccgggacttcaatcgggtgttcgaggtcttttacatccagaccgcgacgcagaccgtcggaggaacccattgcgatggtacgtacgataccgccgccgagctgctgctgaacttccagcaccagacgctcattaccattttgcacctcaagagcatcgtacacgcgcggtacggcatcctgagggaattcgacgtcaactacggcgccgattacctggacaatctttccagtagccatcttaaatcctctacgaaataacctgtttaaaccgcggcggccccgctgacgatctcggtgagttcctgagtaatgctggcctgacgagctttgttgtataccaactgcagctctttaatcaggctgccgccattgtcggtcgcggctttcatcgccaccatacgggcggcctgctcgctggccaggttttcaaccacgccctgataaacctgagattcgacataacgacgcagcagggtatccagcaacgccttcggatcgggttcgtacaggtaatcccaggatttatgtttcagatcatcatcatcacttgccggtaacggcagcagctggctgatggtcggaacctgagacatggtgttaataaatttgttgctgacaatgtaaagcttgtccagacggccttcgtcgtaggcctgcaacatcacttttaccggaccgatcagttcggacagggaagggttatcccccatgccggtgacctgggcaacaacattgccgcccacggagttgaagaagctcacgcctttgctgccgatcattgcgaggtcgcattgaacgcctttgtcggtccaggtcttcatttccgccagcagttttttgaacaggttaatgttcaaaccaccgcacaaaccacggtcggtgctcaccaccaggtagcccacgcgtttaacgtcgcggtcttccaggtaagggtgcttatattccagattaccgtgtgcaaggtgaccaatcactttgcgcatggtttctgcataaggacggctggccgccatgcgatcctggcttttacgcattttggaagcggcgaccatctccatcgctttagtgatcttttgcgtgttctggacgcttgcgatcttactacgtatctcttttgcgccggccatgagcttctcctcaatgccttgcggcctgccctaaggcaagccgccagacgttaccaggattgggttgctttgaaggaatcgaggatgcctttcagcttgccttcgatttcgtcgttgtagccaccggtctggttgatctcttgcatcaacggagcgtgatcacggtcgacgtaagccagcagagcggcttcgaagctgccaattttgctcagttcaacatccgccaggtaaccacgttctgctgcgaacagaaccagagactgctgcgcaacggacatcggcgcatactgtttctgtttcagcagttcggtcactttctgaccgtggtcaagctgcttacgtgttgcatcgtcaaggtcggatgcaaactgagagaacgctgccagttcacgatactgtgccagagcggtacggataccaccggacagttttttcatgatcttggtctgtgctgcaccaccaacacgggatacggaaatacccgggttaaccgcaggacgaataccggcgttgaacaggttggtttccaggaagatctgaccatcggtaatggagattacgttggtcggaacgaacgcagaaacgtcacccgcctgagtttcgataatcggcagtgcggtcagagaaccggttttccctttcacttcacctttggtgaaggcttcaacgtattcggcgttaacacgtgcagcacgctccagcagacgagagtggaggtagaaaacgtcgcccgggaatgcttcacgtcctggcggacgacggagcagcagggagatctgacggtaagcaacagcctgtttagacaggtcatcgtaaatgatcagcgcatcttcaccgcggtcacggaagtattcgcccattgcgcaaccggcatacggtgccaggtattgcagtgcagcggattcagacgcggttgctaccacaacgatggtgttagccagtgcgccgtgctcttccagtttacgtaccacgttagaaatggtggacgctttctggccgatagcgacatagatacatttgataccggaatcgcgctggttgatgatggcatcgatagccagtgcggttttacctgtctgacggtcaccgatgatcaattcacgctgaccacgaccgattgggatcatggagtcaacggctttataaccggtctgtaccggctgatctacggactgacgttcgataacgcccggagcgattgcttctacagcagagaagccgtcgtgatccagcggacctttaccgtcgattggtgcacccagagtgttaaccacacggcccagcaggccacggccaaccggaacttccaggatacggccagtacacttaactttcatgccttcggcaaggtcagcgtacggacccataacaaccgcacctacagagtcgcgctcgaggttcagtgcgatagcgtaacggttacccggcagggagatcatttcaccctgcatacaatcggccaggccgtgaatgcggataacaccgtcacttacagaaacaatagtaccttcgttgtgagcttcactcacaacattgaactgagcaatgcgctgcttgatcagttcgctgatttcggtggaattcagttgcatgctccagtccccttaagactgcaagacgtctgcaaggcgctcaagacgaccgcgtacgctgccatcaatgaccatatcacccgctcggatgataacgcctgccattacagacttatcgattttgcaattcagcttaactttgcgactcagacgtttttccatcgcagcagaaattttcgcgagctgttgttcactcagtgcggcagcggaaatgacgtctacctcagcggtagcctcactcacggcacgcaggtgaataaactgctccagaacatccgggagcgcgttaagacgaccattttcagccataacccgaatcaggttctgaccgttttcgtccagttgctcaccacaaactgcgataaagctctcggcgagcgtttctggcgcaagcgcgccagagagaagctctgccatttgttcgtttttggttacctcggcggcaaacgccagcatgtcctgccagcgttctacactttggtgttcgacggcaaagtcaaaagctgctttggcgtaggggcgagctaccgtaataaattcagacatcagcccctccctccttacagttcagcgacaagtttatccacgatgtcgctgttagcagcttcatccacggaacgttcgatgatcttctcggcgccagcaacagccaggatagcaacttgcttacgcagctcttcacgggcacgtttacgctcggcttcaatttccgcctgcgcctgggccacgattttagtacgttcctgttctgcctcagctttcgcttcgtccagaatctggctgcggcgtttgttcgcctgctcgatgattacctgggcttccgctttcgcttttttcagctggtcggtcgcgctggcctttgcaaggtcaaggtccttatgtgctcgttctgcggaagcaaggccgtcagcaatttctttttgacgtttttcgatggctgccattaatggcggccatacgtacttcatgcagaacagaacgaacaggacaaacgcgatggcctggccgaggattgttgcgttaagattcacagcacaatgcctctatttagttaacgttctgatattgctctttaaataaaagcaacgcttattacgcgacagcgaacatcacgtacagacccagacctacagcgatcatcgggatagcatccaccagacccataacgataaagaactgagtacgcagcagaggaatcagatcaggttgacgcgctgcgccttccaggaatttacccccgaggatgccgataccgatcgcagcaccgattgccgccagacccatcatcacagcggcagccatgtacagcagatccatattcaggttttccatgacagtctccagtttgtttcagttaaaacgtagtagtgttggtaaattaatgttcttcagacgccatgctcagatagacgatcgtcagaaccatgaagatgaaggcttgcagcgtaatgatcaggatgtggaaaatggcccacggcacattcaggatccactgactccaccacggcaacagaccagcaatcagaatgaaaatcagctcaccggcatacatgttaccgaacagtcgcaaaccgagactaactggtttggacagcaggcttaccccttcaaggattaagttgacaggaatgaacgcccagtgattgaacggctgcagcgtcaactctttcgtgaagccgccgatgcctttcattttgatgctgtagaacagaatcaggataaatacgcccagtgccatagacagcgttacgttcacgtccgcagacggaaccacacgcagtgcaggcagacccagtacatgttcagcaatgtacggcagcaggtcgataggcagtaaatccatcaggttcatcaggaatacccagacgaagatcgtcagggccagcggagcaatcagcttgcttttgccatggtacatgtctttcacgctaccattaacaaagccgatcaccagctcaatcgcggtctgaaacttacctggcacaccgctggtcgcctttttggctacgctacggaataaaaccaggaacaacagacccagcaccacgctgaagaacatggagtcaatattgattgtccagaaggtggctggggggttttgtggatccaccaggctgaatgtacgcaggtccagctgaaggttattcaggtggtgtcctatgtaatcctgcggcgtcatattttcactagccatgatgccttttaccctttgttgttaattacagccggtgccagtatctgaaccaccagcaccaaaacccacgtaacgatcagcggcaagaataccgcctttaaaaccgccaacgccaccaccagtaacaccaacatcgccagaactttgaaagcttcgccaaatgcgaatgtccaggccacccggcctttcgctggtgtatgcgcctggtgacgccaggcaaatatcataaacaaaacgttaggcagaaagactgccaggcccccgcttattgcagagacgccccagaaggggtctttgaggctgaacagcaatccacttgctatcaccaccagtaactgaacgagcagaagcttccgagcaacgtttcgactcacgaggctcacagacatcacgtttttcactcctgctcccttcgaggtatgccgcgtgtcgtataaaactttctttaaggcttagagtcaagcatcaaaaagcggtcaaattatacggtgcgcccccgtgatttcaaacaataagtagccaaaaggtgaataaatgtttaaatatttttccagtgcatacaattgcgacttttctgctaaccctgttcgatcatgaaaaactgtaaataacgcgtaaacactggtgataaagcgtgcttcagatcacatattgcgcatgttcgcgcacagcatatttatttacttggcaaatgatgcctttgcaagtttatgatatttcagtctaaaaacagatactgttttaataaatgacatttacacaacaaaaaccacccattgacatttttaataatgttttaacagccaatgatggttcttagcgccgatttttagcagactgatattttcactaatgacttattttctgcttaccaaaaaaagccacgttatcttgttgatgcaaaagagtgaacgtggcgttaaatgtaaccagttatatcagtagaaaacctggttgttgttaacagtctaaccggtcaattttttatgatttttttgataaaaattaaattttatttgctttaatcaccaccagatgacgttcgccatccagggctggaacctgaagtttaaccacactttcgacctgatattcttcgggcaacaaagcgatttcatcttccggcatttgccctttcagcgcgtagaaacggccttgctcaccaggaagatggtggcaccagctcaccatatcgttcagagaggcaaaagcgcggctaattacgccatcaaatggcggctcactaggaaactcttctaccctgctctgtactggttcaatattctccagtttaagctcatgttgcacctgacgaaggaaacgcacgcgtttaccaaggctatccaacagagtgaaatgggcttcaggacgcacgatagagagtggaatgcctggcagtcctggtccggtgccgacatcgataaaccgttcaccttgcagatacggtgccaccacaatgctatcgagaatatggcgtaccagcatctcattaggatcgcggacgctagtcaggttgtacgctttgttccatttatgcagcatattcacgtaggcaataagctggtttttctggtgatcggtaaggctaatacctgcgtctttcagcagtaaggagagtttgttgagcacggtgattacctgttcttgatgcgttgcctggtaagcgggtgcttaccaggcatttttaatgcgttatgcgctacgacgcagcataccctgttttttcagccacaccagcagaatggagatggccgcaggcgtgacgccagaaatacggctagcttggccgatagaggctggtttgtgatcgttaagtttggcgatcacttcgttagaaagaccggatacctggcggtaatccagtgtcgcgggtagcagggtgttctcgttacgcagctgcttttcgatctcatcttgctggcgcgcgatataaccttcgtatttaacctgaatctcaacctgttccgccgcctgttcgtctgtcaacgcaggggcaaacggcgtcagcgtggttaatttttcataagtcatttccggacgacgcagcagatcttcaccactggcttcacgggaaagcggcgcagtcaggtgagcattcacttcggctgcagcttccgcgctcggggttacccaggtgcttttcagacgctgacgctcacgctcgatattctcaagtttctcgttaaagcgcgcccaacgttcgtcatccaccaggcccagttcacgaccgatttcagtcaaacgcagatccgcattatcttcgcgtagcatcagacgatattctgcgcggctagtaaacatacgatacggttctttggttcctaaagtgcacaggtcatcaactagtacgccgagatacgcctgagaacgtgccggagcccaaccttctttgtcagcagacagacgggcagcgttaagaccggccagcaaaccttgcgcagcggcttcttcgtaaccggtagtgccgttaatctgaccagcaaagaacagcccctggataaacttgctctccagcgtcggtttcaggtcgcgaggatcgaagaagtcatactcaatggcataacccggacgcacgatcttcgcgttttccatcccctgcatagagcggacgatttgcatctgcacatcgaacggcaggctggtggagataccgttcggataaatttcattagaggtcagtccttccggttcaaggaagatctgatgctgatttctgtcggcgaagcgcatgactttgtcttcgatgctcgggcagtagcgtgggccgacaccttcgatcacccctgcgtacattgggctacgatcgaggttactgcggatcacatcatgggttttctcgttggtatgagtgatataacacggcacctgctggggatgctgggacgcattgcccataaagctgaataccggcattgggttatcgccatgctgttgcgccagtacgctaaagtcgatggttcgagcatcaatacgcggtggtgtcccggttttcagacgaccaacgcgcagcggcagttcacgcaaacggcgagaaagcggaatggacggcggatcaccagcacggccaccgctgtaattatccagaccgatatgaattttaccgtcgaggaacgtcccaacggtgagcacgacggctttggcacggaacttcagtcccatttgggtaacagcaccgaccacgcgatcgttttcgacaataagatcttcaaccgcctgctggaagatcatcaggttcggttggttctccagcgccgtacgtaccgcctgacggtagagcacacgatccgcctgagctcgggtagcgcgaaccgccggtcctttgcttgcgtttagtatcctaaactggatacccgcctgatcgatcgctttcgccatcagaccgccgagtgcatccacttcttttaccagatgtcccttcccaataccgccgatcgccgggttgcagctcatctgccccagagtgtcgatattgtgtgtcaaaagcagagtctgttgacccatacgcgccgcggccatcgcggcctcggtgcctgcatgacccccgccaatgatgatgacgtcaaaaggatccggataaaacatggtgattgcctcgcataacgcggtatgaaaatggattgaagcccgggccgtggattctactcaactttgtcggcttgagaaagacctgggatcctgggtattaaaaagaagatctatttatttagagatctgttctattgtgatctcttattaggatcgcactgccctgtggataacaaggatccggcttttaagatcaacaacctggaaaggatcattaactgtgaatgatcggtgatcctggaccgtataagctgggatcagaatgaggggttatacacaactcaaaaactgaacaacagttgttctttggataactaccggttgatccaagcttcctgacagagttatccacagtagatcgcacgatctgtatacttatttgagtaaattaacccagcttcccagccattcttctgccggatcttccggaatgtcgtgatcaagaatgttgatcttcagtgtttcgcctgtctgttttgcaccggaatttttgagttctgcctcgagtttatcgatagccccacaaaaggtgtcatattcacgactgccaataccgattgcgccaaagcggactgcagaaagatcgggcttctgttcctgcaatgcttcatagaaaggagaaaggttgtccggaatatctccggcaccgtgggtggagctgataaccagccagatcccactggcaggtaaatcttctaacagcggaccgtgcagcgtttcggtggtaaaacccgcctcttccagcttttcagccaggtgttctgctacatattcggcaccgccgagggtgctgccgctgataagagtgatatctgccataaaccgccacctttattaagagtggcgtattgtacgctgtgaacgcgttgggatctacctgtggaaaagtatgggattaaaaaagccgatcagggcttgatggtacgcatgatcgggttttgcaggacgatcaatgtctcggtggactgaatttcatcaattgtttggatcttgttgataagtacatgctggagagcgtcgatgctacggcacatcacttttataaagatgctgtagtggccggttgtgtaataggcttcagtgacttcatcaaggctttccagctttgccagcgcggaagggtagtctttggcgctctttaatataatgccgataaagcagcctacgtcataaccgagctgcttcgggctgacatcaatacgcgccccggtaatgatccccgcctgcttcattttctctactcgaacgtgaatcgtccccggactgacgccaaattgtttcgccagttcggcgtaagcggtgcgcgcattgcccattaatgcttccaggatgccacggtccagattgtcgatcagataattttccataggattttcttatgcggattgatgattcattctattttagccttcttttttaatgaatcaaaagtgagttaggctttttattgaatgattattgcatgtgtgtcggtttttgttgcttaatcataagcaacaggacgcaggagtataaaaaatgaaaaccgcttacattgccaaacaacgtcaaattagcttcgtgaaatctcacttttctcgtcaactggaagaacgtctggggctgatcgaagtccaggcgccgattcttagccgtgtgggggatggcacgcaggataacttgagcggctgtgaaaaagcggtgcaggtaaaagtgaaagctctgcctgatgcccagttcgaagtggttcatagtctggcgaagtggaaacgtcagaccttagggcaacacgacttcagcgcgggcgaagggctgtacacgcacatgaaagcccttcgccccgatgaagaccgtctttctccgttgcacagcgtctatgttgaccagtgggactgggaacgcgtaatgggcgacggtgagcgtcaattcagcactctgaaaagcacggtagaggcgatctgggcgggaattaaagcaaccgaagctgcggttagcgaagagtttggcctggcaccgttcctgccggatcagatccacttcgtacacagccaggagttactgtctcgttatccggatcttgatgccaaagggcgtgagcgggcgatagcgaaagatcttggcgcggtattccttgtcgggattggcggcaagctgagcgatggtcatcgccacgacgtgcgcgcaccggattatgatgactggagcaccccgagtgagctgggccatgcgggtctgaacggcgatattctggtgtggaacccggtactggaagatgcgtttgagctttcctccatggggatccgtgtagatgccgacacgctgaagcatcaactggcgctgaccggtgacgaagatcgcctggagctggagtggcatcaggcgctgctgcgcggtgaaatgccgcagaccatcggcggcggtatcggccagtctcgtttgactatgctgctgctgcaactgccgcatatcggccaggttcagtgtggagtatggccagctgctgttcgcgagagcgtcccttctctgctgtaataatttatcgccgccagcgtctgagcaggcggcttcgcatcccggtatcaaagcgccagatatgatcgaaaatgcgcatgatgccgggtttgccgtgtgcgctcatcgccacggcatgaaagcgatgctgatgtacccgctgcagctctttcactttactcgtcacgtcgtcaggcaaccgctgagcgataaaatcagaaatcaccaccgcatcggcatcaaaccattccctgctttgcaagcgttccataatggcgcgaaaacaactggcaagatcggtgccgccacgaaactgctggcttaaaaaacggattgcttgttcgatgccttgtgggccactaagctcataacggacgatctcggtggaaaatagcataatatagcagcgccggttttctgcgagagcaatgcgcatcaaggccaggcagaacgctttcgcacactgttcattaaagccgcccatactgccggaagtatccacacagacaataaacggcccgcgcggctgttcatcgtaatctttatgtaccaccggacgttcgatcactttttcacgccagctctcaccgtgcaggcgataggtgagcaactgtttttccaccagccgacggtaaaactcatactccagttccgttatccctagtgtcgccagttctggcggcaggagacgtaaaatatcatcgctttgttgcagaccatcaacctgctcaggaaccgtcgccggttcgcgcaccatggtgcggaaggtttccatctgcgcatcgttgcgcggtatacttttggcttcccgagaacgccccagctgctctgccaggcgtttcagttccggctgttcgttaagaaattcaccgtatttcacaatcaactgatagtcgccacgtttaagctgaccggcgctcatatcccacagacgaccagctgcagtattgttatctgcgagaatcggttcaagttgtccgctcagcgtcatgcgttcctgaacttcactcaacagttgttcgcgttcttcttctaatagctgttgatttaacgtcgttgcttgcacgatcagacttaaacgccaacgctggagaaaaagcgtgtgtaacgcactagtgatcgtgctgttagcatcaaccaactgtcgggcttgttctgcccatggagaattcagacgatgcagtaagtccaggatctgtggtagctgcacaataaactgtggcgtggagaggagctggctttgctgatagcacatcacctcttcggtgagttccggcgggactcgggcatctttcagccgactgcgcagcgcttcacgccagcggggaacatcatcagtgattgccgccttcaggcgtgggaatttttcaaagaagaccgccagctgcggactggccagcagtgcgatgatcatctcttcgatcaatccctcttcgctgacggccagcatcacattaagcgtatccagcgttagcattgttgtgcctggcgaatctgtgcaccgacatcctgtaggctggcttcaatgcgacctaaccagtcgccagggataaacagacatttttgctgttcgctgaataaagcgtgttgcttgcgccagtcgctttcaagctcttccagttgttgttttatttcaccaggcagaccttcagcgctactaccgggaagtgccagcgtactgccttgtaaacttacatcgcgaacgacaagatgttgggcgctatcaacttccagattcagtttctgggcaaagccgataccgttcagtttaccgcgaatttcaccacctttgctcagccactgttccagcgcgctacgctcaaaggagatatgaaccacttccatatcatgcagttttaacggtttttgcagcagtagagtcagagtggaagcagtaacgttaacaggaagttgatactgctgacgacggctgaaaatgccgcccagacgaattaccgttaaggctgttttatcgctttgttgctgctggagttgcaggtgacgttgcacaatcgcgccaaggcgagtcaacatcccttgctgttgccaggcgtgaccggtcatcaatacatcaatttgttgttgtatcaaattcaggctttgcgcgtcataccacaggcaatctttcagcaaaatgagatctaccggggcaacagcactgcgaccgctaaaaaaggcgctggcctgcaataatcggatcgcttttttccagcgacgatcgctgacataaggcgcatccggtaatttatccagttgctggcgcagcataaaaatcagctcaaatacatgatcgggcagcgtaatttcaccaatctctttctgccagcgttcatattcttcatctgtgacctgcaaggcatcaggaaccggattgtcgttttcatcctgttgactggtcagcatggagcggaaattcgctttatcctgcactttatctaaccacagacgaatcagcatgcggtcatataacgcttccagactgctgtctgcttccggcagctcgttggaggccgccaccagcagacgcatcgggattttttctacgtgtgcaccgttgcggaactggcgctcgttaatggcggtgagcaaggtattaagaattgccgggcccgctttccagatctcatccagaaagacaatttctgcttccggcaggtaaccgctggttaaacgttcatagcgcccttcatcttttagcgcctgaatagaaaggggaccaaaaacttcttccggcgtggagaagcgggtcatcagatattcaaacgcgcgggcattctgaaaggcgaattttaagcgccgggcgatcaaacttttggcaatacctggcgggccaaggaggaacacactttcaccacttaatgccgctaataaacacaagcggatggcgtggctacgttcataaagccccttttccaagctactgctcaggcgggaaattctttccgctaataaatgagggtgagccataatgaagtggcgtcctttcgtcaaaagttctgcgtaaattgcgagtatagacgtttcttgctggtggctaaaatagtctcaaagggggggtatttttctttgagccaggttaatgtggccgcatttaggagtacgattttgccgttaatcgtgcatactgtgcgcttttttgtgggccaagggactaagcacacatttcatatttcaacgaaagactagtctatgagcactgataataagcaaagtttgcccgcgattaccctcgcggcgattggagttgtctacggcgatattggtaccagcccgttatatacacttcgtgaatgtttgtccggccagtttggttttggcgttgaacgcgatgccgtgtttggctttttaagcctgatcttctggctgctaatctttgtggtttccattaaatatctcaccttcgtgatgcgggcagataacgccggtgagggggggatcctgacgttgatgagccttgccgggcgtaatacgagcgcgcgaaccacaagtatgctggtgattatggggctaatcggcggcagctttttctatggtgaagtcgtcataacacccgctattagcgtgatgagtgccattgaaggtctggaaatcgtcgccccgcagctggatacctggatagttcccctcagtattatcgttctcactttattatttatgattcaaaaacatggcacggctatggtcggtaagctgtttgcgccgatcatgctgacctggtttttgattctggcaggactggggttacgtagcattattgctaacccggaagtgctgcatgcgctgaatccaatgtgggcggtgcatttcttccttgaatacaaaacggtttcttttattgcattaggggcagtggtgttgagcattacgggggtcgaggcgctgtatgctgatatggggcactttggtaagttccctattcgcctggcgtggttcaccgtcgtattaccttccttgacccttaattacttcggtcagggagcgctgttgttaaagaacccggaagcgattaagaacccgttcttcctgttggcaccggactgggcgctgatcccgctgctgatcatcgccgcactggcgacggtaattgccagccaggcggttatctctggcgtcttcagtttgacgcgtcaggcggtacgtctgggatatttgagcccgatgcgcattattcacacctccgaaatggagagtgggcaaatctatattccgtttgtgaactggatgctctatgtcgcggtcgtgattgtgattgtcagctttgagcactccagcaacctggcggcggcgtacgggattgcggtgaccggaaccatggtgctgacgtctattctcagcactaccgtggcacgtcagaactggcactggaataagtattttgttgcgctgatcctgattgctttcctttgtgtcgatattccattgttcaccgctaacctcgataaactgctctccggcggctggttgccattgagcctcggtactgtgatgtttatcgtgatgaccacctggaagagcgagcgtttccgcttgctgcggcggatgcatgaacatggtaactctctggaagcgatgattgctagcctggagaaaagtccgcctgttcgcgtgcccgggaccgcggtgtatatgagccgtgcaatcaacgtcattccctttgcgctgatgcataaccttaaacataacaaggtattgcatgagcgggtgattctgttaactctgcgcaccgaagacgctccatatgtccataacgtccgtcgggtacagattgaacaactgagccccactttctggcgcgtggtggcaagttatggttggcgagaaacgccaaacgtagaagaagttttccaccgctgcggtctggaaggattaagttgccggatgatggaaacctccttctttatgagccatgagagcttgatcctcggcaaacgcccgtggtatttgcgtctgcgcggcaagctgtacttgctgctgcaacgtaatgcgctgcgtgcaccagatcaatttgaaatcccgccaaacagggttatcgaactgggtactcaggtcgaaatctaacgccagacgcctcctttcttcataagggggcgtttttgttttcatggttaatcaccatgtaaaacgtttcgaggttgatcacatttccgtaacgtcacgatggttttcccaactcagtcaggattaaactgtgggtcagcgaaacgtttcgctgatggagaaaaaaatgaaaaaaggcaccgttcttaattctgatattagtagcgtgatctcccgtctgggacataccgatacgctggtggtgtgtgatgctggtttacccatccccaaaagtacaacgcgtatcgatatggcattaacccagggtgtaccttcttttatgcaggtgctgggcgtcgtcacaaatgaaatgcaggtcgaggcggccattatcgcggaagagatcaaacaccataatccgcaactccacgaaacgttgctcactcaccttgagcagctgcaaaaacaccagggaaataccattgaaattcgttacaccacgcatgaacaattcaaacaacaaaccgcagaaagtcaggcggtaattcgcagcggagaatgttctccgtatgcgaatatcattctctgtgctggcgtgacgttctgaggccgtcatggaagcattacttcagcttaaaggcatcgataaagccttcccgggcgtaaaagccctcagcggcgcagcgttaaatgtctatccgggccgcgtgatggcgctggtgggcgaaaacggcgcgggtaaatccaccatgatgaaagtgcttactggcatctatactcgcgatgccggtacgcttttatggctggggaaagaaacgacatttaccgggccaaaatcttcccaggaagccgggattgggattatccatcaggaactgaacctgatcccgcagttgaccattgccgaaaacattttcctcggtcgtgagtttgttaatcgctttggcaaaattgactggaaaaccatgtatgccgaagcggataaattgctggctaaacttaacctgcgctttaaaagcgacaagctggtgggcgatctttccatcggtgaccagcaaatggttgaaatcgccaaagtgctgagctttgagagcaaagtcatcattatggatgaaccgaccgatgcgctgaccgataccgaaaccgaatccctgttccgcgtcatccgcgagctgaaaagccaaggccgcggtattgtctatatctcccaccgcatgaaagaaatcttcgagatttgcgatgacgttaccgtttttcgtgatgggcaatttattgctgagcgcgaagtggcaagtctgaccgaagatagcctgattgagatgatggtgggtcgcaagctggaagatcaatatccgcacctggacaaagcgccgggagatatccgcctgaaagtcgataatctctgcggacctggcgttaacgatgtctcttttactttacgcaaaggcgaaattcttggcgtctctggtttgatgggcgcaggtcgtaccgaactgatgaaagtgctctacggcgcactaccgcgcaccagcggttacgtcaccctggatgggcatgaagtcgttacccgtagtccgcaggatggcctggcaaacggcattgtgtatatctccgaagaccgtaaacgtgacggtttagtgttgggcatgagtgtaaaagagaacatgagcctgacagcgctgcgctacttcagccgcgctggcggcagtttgaagcatgccgatgaacagcaggctgtgagtgatttcattcgtctgtttaatgtgaaaactccgagcatggaacaggcaattggtctgctttccggtggcaatcagcaaaaagtggcgattgcccgcggtctgatgacacgccccaaagtgttgatccttgatgaacctacccgtggcgtagatgtcggcgcgaaaaaagagatctatcaactgattaaccagttcaaagccgatggcttgagcatcattctggtgagtagcgagatgccagaagtattaggcatgagcgatcgcatcatcgtcatgcatgaagggcatctcagcggggaatttactcgtgagcaggccacccaggaagtgttaatggctgccgctgtgggcaagcttaatcgcgtgaatcaggagtaaaaaaatgacaacccagactgtctctggtcgccgttatttcacgaaagcgtggctgatggagcagaaaagccttatcgctctgctggtgctgatcgcgattgtcagcacgttaagcccgaactttttcaccatcaataacttattcaatattctccagcaaaccagtgtgaacgccattatggcggtcgggatgacgctggtgatcctgacgagcggcatcgacttaagcgtaggttctctgttggcgctgaccggcgcagttgctgcatctatcgtcggcattgaagtcaatgcgctggtggctgtcgctgctgctctcgcgttaggtgccgcaattggtgcggtaaccggggtgattgtagcgaaaggtcgcgtccaggcgtttatcgctacgctggttatgatgcttttactgcgcggcgtgaccatggtttataccaacggtagcccagtgaataccggctttactgagaacgccgatctgtttggctggtttggtattggtcgtccgctgggcgtaccgacgccagtctggatcatggggattgtcttcctcgcggcctggtacatgctgcatcacacgcgtctggggcgttacatctacgcgctgggcggcaacgaagcggcaacgcgtctttctggtatcaacgtcaataaaatcaaaatcatcgtctattctctttgtggtctgctggcaagcctggccgggatcattgaagtggcgcgtctctcctccgcacaacccacggcggggactggctatgagctggatgctattgctgcggtggttctgggcggtacgagtctggcgggcggaaaaggtcgcattgttgggacgttgatcggcgcattaattcttggcttccttaataatggattgaatttgttaggtgtttcctcctattaccagatgatcgtcaaagcggtggtgattttgctggcggtgctggtagacaacaaaaagcagtaataacgactacaggacatcttgaatatgaacatgaaaaaactggctaccctggtttccgctgttgcgctaagcgccaccgtcagtgcgaatgcgatggcaaaagacaccatcgcgctggtggtctccacgcttaacaacccgttctttgtaagcctgaaagatggcgcgcagaaagaggcggataaacttggctataacctggtggtgctggactcccagaacaacccggcgaaagagctggcgaacgtgcaggacttaaccgttcgcggcacaaaaattctgctgattaacccgaccgactccgacgcagtgggtaatgctgtgaagatggctaaccaggcgaacatcccggttatcactcttgaccgccaggcaacgaaaggtgaagtggtgagccacattgcttctgataacgtactgggcggcaaaatcgctggtgattacatcgcgaagaaagcgggtgaaggtgccaaagttatcgagctgcaaggcattgctggtacatccgcagcccgtgaacgtggcgaaggcttccagcaggccgttgctgctcacaagtttaatgttcttgccagccagccagcagattttgatcgcattaaaggtttgaacgtaatgcagaacctgttgaccgctcatccggatgttcaggctgtattcgcgcagaatgatgaaatggcgctgggcgcgctgcgcgcactgcaaactgccggtaaaagcgatgtgatggtcgtcggatttgacggtacaccggatggcgaaaaagcggtgaatgatggcaaactagcagcgactatcgctcagctacccgatcagattggcgcgaaaggcgtcgaaaccgcagataaagtgctgaaaggcgagaaagttcaggctaagtatccggttgatctgaaactggttgttaagcagtaattttaatcaggttgtatgacctgatggtgacataaatacgtcatcgacagatgaacgtgtaatataaagaaaagcagggcacgcgccaccctaacacggtggcgcattttatggacatcccgaatatgcaaaacgcaggcagcctcgttgttcttggcagcattaatgctgaccacattcttaatcttcaatcttttcctactccaggcgaaaccgtaaccggtaaccactatcaggttgcatttggcggcaaaggcgcgaatcaggctgtggctgctgggcgtagcggtgcgaatatcgcgtttattgcctgtacgggtgatgacagcattggtgagagcgttcgccagcagctcgccactgataacattgatattactccggtcagcgtgatcaaaggcgaaagtacaggtgtggcgctgatttttgttaatggcgaaggtgagaatgtcatcggtattcatgccggcgctaatgctgccctttccccggcgctggtggaagcgcaacgtgagcgtattgccaacgcgagtgcattattaatgcagctggaaagtccactcgaaagtgtgatggcagcggcgaaaatcgcccatcaaaataagactatcgttgcgcttaacccggctccggctcgcgaacttcctgacgaactgctggcgctggtggacattattacgccaaacgaaacggaagcagaaaagctcaccggtattcgtgttgaaaatgatgaagatgcagcgaaggcggcgcaggtactgcatgaaaaaggtatccgtactgtactgattactttaggaagtcgtggtgtatgggctagcgtgaatggtgaaggtcagcgcgttcctggattccgggtgcaggctgtcgataccattgctgccggagatacctttaacggtgcgttaatcacggcattgctggaagaaaaaccattgccagaggcgattcgttttgcccatgctgccgctgcgattgccgtaacacgtaaaggcgcacaaccttccgtaccgtggcgtgaagagatcgacgcatttttagacaggcagaggtgacgcttggctacaatgaaagatgttgcccgcctggcgggcgtttctaccagtacagtttctcacgttatcaataaagatcgcttcgtcagtgaagcgattaccgccaaagttgaagcggcgattaaagaactcaattacgcgccaagtgctctggcgcgtagcctcaaactcaatcaaacacataccattggcatgttgatcactgccagtaccaatcctttctatagtgaactggtgcgtggcgttgaacgcagctgcttcgaacgcggttatagtctcgtcctttgcaataccgaaggcgatgaacagcggatgaatcgcaatctggaaacgctgatgcaaaaacgcgttgatggcttgctgttactgtgcaccgaaacgcatcaacctagccgtgaaatcatgcaacgttatccgacagtgcctactgtgatgatggactgggctccgttcgatggcgacagcgatcttattcaggataacagcttgctgggcggagacttagcaacgcaatatctgatcgataaaggtcatacccgtatcgcctgtattaccggcccgctggataaaactccggcgcgcctgcggttggaaggttatcgggcggcgatgaaacgtgcgggtctcaacattcctgatggctatgaagtcactggtgattttgaatttaacggcgggtttgacgctatgcgccaactgctaagtcatccgctgcgtcctcaggccgtctttaccggaaatgacgctatggctgttggcgtttaccaggcgttatatcaggcagagttacaggttccgcaggatatcgcggtgattggctatgacgatatcgaactggcaagctttatgacgccaccattaaccactatccaccaaccgaaagatgaactgggggagctggcgattgatgtactcatccatcggataacccagccgacccttcagcaacaacgattacaacttactccgattctgatggaacgcggtagcgcttaattactcgctttcacttggaacgcggttcggcttagatttacgctgtcttttgatcaaattattaccatcggttgttttcagaagcatgaacattgctgcactagcaacagtaataatgcccattgtgataaacgtatagtggaattgttcgacagtcgttgtgccttccattccttcataaacgcgaaggacggccgcacttacagcaacgcctaaactaatgctcagttgctgcgtgaccgccagaacactgttaccgctgctggcattgtcatcggtcagatcggcaagtgtgatggtattcatcgcggtaaactgcgtgctcatagccatccctaatataaacaacggcaagatcagcatccatatagccattgctggactttgcaaagagaactgagcgatcattagcccaataatcaccgtgatccccactaacgtatggcgatagcccagacgacgtaagacttgggtaaccatgctttttgcaataatggaacctaacgctgtcggtgccatcatacagccagcaataaacgcctgataaccaaatcctacctgtaacatcaatggcataaggaacggtacacagccggtccccagacgggttgcaatattgcctacgataccgatgctgaaagtgcgggttttaaataaatctaaactaattaatgggtttggcgtgcgtcgtgcatggagaatatagagaagcagtaacccgatgctggtgacaattaccgtcaaggcaatccagctggcgacaatcttttccccgaatagctctattccgctactgaagagaacaaggctgaggccaaacagcaaaaagccagtgatatcgaatctgcgtcgtgcggtggtgaaattgggcatatgtttgcgcgcgtaaagaaggcccgcaatacctatggggatattgattaaaaatatccagtgccaggttgcccaggtgaccagcacgccgccaagaacggggcctaaaattggccccaccagacccggcatggcgacaaaattcaatactggaagaagttcattacgaggataagcgcgcagtaaggccagccgagcaacaggcatcatcattgcgccgcctatcccctgaataacccggaagacaaccagctgtggtaggctattagaaagtgcgcaggccagagaacccaatgtgaacagactcacggcaagggtaaaaatgcgacgcgtaccgaagcgatcggctagccatccgcttaccggaataagcatcgccaccgtcagcgtataactgatgatggcactttgcatcgcgagaggagaacgattaaggctatgagcgattgcgggtaaggcggtattaagaatagtggcatcaagtgcctgcatgaagaaggccatcgccgcgatccacggcaaacccgccatactgcgcttctttttatcgctcattcaatgtcctgttatcgggttatcacttatcaggactgcgtagcagcgcctgacaagctttaaatgccgcgtcgccatcgctttggataatcgcatcgacaatcgcctgatgcagatccagctttatcactgtgtcgctggtaatactcgtgaagtaagtgtgataaacgctatggaataggctggcgaaactggtcaaaaacggattggcgctcatttcatagatatgctcatgccaggccatatcgacttcgatccagcgttcacggcgaaagttctcttttaatgccgccatttcggccattaacgtattgagatgcgctttctgttccgcggtgccaaccgttgctgccagtaggcaggcttgcggctccagacagatacgcataaccagaaagtgatcgatgacctgatgaaagttctcttctgtcatccaccaggtaagcaattcctgatcaagaaaattccagttgctttgtggcatgacccgagtaccaattcgcggtcgcggtaaaaccatcccttttgccgttaacgttttgaccgcttcgcgtaccgctgtacgactcactccaaattgctcgcccagctcaatctcaccgggcaaaatggtgccgggttcatattcaccttttaagatccgttgcgccagcttctcagccagaacatagctaaggtttttctgtgcagctaactgttgtgcgcttaaaggcattacttatcttcctttttctttttattcctccttagtatgccaccaggaagtgtgattacggttgcaaaaacggcaaattgcttgttttatggcacattaacggggcttttgctgaaaaaatgcgcggtcagaaaattattttaaatttcctcttgtcaggccggaataactccctataatgcgccaccactgacacggaacaacggcaaacacgccgccgggtcagcggggttctcctgagaactccggcagagaaagcaaaaataaatgcttgactctgtagcgggaaggcgtattatgcacaccccgcgccgctgagaaaaagcgaagcggcactgctctttaacaatttatcagacaatctgtgtgggcactcgaagatacggattcttaacgtcgcaagacgaaaaatgaataccaagtctcaagagtgaacacgtaattcattacgaagtttaattctttgagcgtcaaacttttaaattgaagagtttgatcatggctcagattgaacgctggcggcaggcctaacacatgcaagtcgaacggtaacaggaagaagcttgcttctttgctgacgagtggcggacgggtgagtaatgtctgggaaactgcctgatggagggggataactactggaaacggtagctaataccgcataacgtcgcaagaccaaagagggggaccttcgggcctcttgccatcggatgtgcccagatgggattagctagtaggtggggtaacggctcacctaggcgacgatccctagctggtctgagaggatgaccagccacactggaactgagacacggtccagactcctacgggaggcagcagtggggaatattgcacaatgggcgcaagcctgatgcagccatgccgcgtgtatgaagaaggccttcgggttgtaaagtactttcagcggggaggaagggagtaaagttaatacctttgctcattgacgttacccgcagaagaagcaccggctaactccgtgccagcagccgcggtaatacggagggtgcaagcgttaatcggaattactgggcgtaaagcgcacgcaggcggtttgttaagtcagatgtgaaatccccgggctcaacctgggaactgcatctgatactggcaagcttgagtctcgtagaggggggtagaattccaggtgtagcggtgaaatgcgtagagatctggaggaataccggtggcgaaggcggccccctggacgaagactgacgctcaggtgcgaaagcgtggggagcaaacaggattagataccctggtagtccacgccgtaaacgatgtcgacttggaggttgtgcccttgaggcgtggcttccggagctaacgcgttaagtcgaccgcctggggagtacggccgcaaggttaaaactcaaatgaattgacgggggcccgcacaagcggtggagcatgtggtttaattcgatgcaacgcgaagaaccttacctggtcttgacatccacggaagttttcagagatgagaatgtgccttcgggaaccgtgagacaggtgctgcatggctgtcgtcagctcgtgttgtgaaatgttgggttaagtcccgcaacgagcgcaacccttatcctttgttgccagcggtccggccgggaactcaaaggagactgccagtgataaactggaggaaggtggggatgacgtcaagtcatcatggcccttacgaccagggctacacacgtgctacaatggcgcatacaaagagaagcgacctcgcgagagcaagcggacctcataaagtgcgtcgtagtccggattggagtctgcaactcgactccatgaagtcggaatcgctagtaatcgtggatcagaatgccacggtgaatacgttcccgggccttgtacacaccgcccgtcacaccatgggagtgggttgcaaaagaagtaggtagcttaaccttcgggagggcgcttaccactttgtgattcatgactggggtgaagtcgtaacaaggtaaccgtaggggaacctgcggttggatcacctccttaccttaaagaagcgtactttgtagtgctcacacagattgtctgatagaaagtgaaaagcaaggcgtttacgcgttgggagtgaggctgaagagaataaggccgttcgctttctattaatgaaagctcaccctacacgaaaatatcacgcaacgcgtgataagcaattttcgtgtccccttcgtctagaggcccaggacaccgccctttcacggcggtaacaggggttcgaatcccctaggggacgccacttgctggtttgtgagtgaaagtcgccgaccttaatatctcaaaactcatcttcgggtgatgtttgagatatttgctctttaaaaatctggatcaagctgaaaattgaaacactgaacaacgaaagttgttcgtgagtctctcaaattttcgcaacacgatgatgaatcgaaagaaacatcttcgggttgtgaggttaagcgactaagcgtacacggtggatgccctggcagtcagaggcgatgaaggacgtgctaatctgcgataagcgtcggtaaggtgatatgaaccgttataaccggcgatttccgaatggggaaacccagtgtgtttcgacacactatcattaactgaatccataggttaatgaggcgaaccgggggaactgaaacatctaagtaccccgaggaaaagaaatcaaccgagattcccccagtagcggcgagcgaacggggagcagcccagagcctgaatcagtatgtgtgttagtggaagcgtctggaaaggcgcgcgatacagggtgacagccccgtacacaaaaatgcacatattgtgagctcgatgagtagggcgggacacgtggtatcctgtctgaatatggggggaccatcctccaaggctaaatactcctgactgaccgatagtgaaccagtaccgtgagggaaaggcgaaaagaaccccggcgaggggagtgaaaaagaacctgaaaccgtgtacgtacaagcagtgggagcacgcttaggcgtgtgactgcgtaccttttgtataatgggtcagcgacttatattctgtagcaaggttaaccgaataggggagccgaagggaaaccgagtcttaactgggcgttaagttgcagggtatagacccgaaacccggtgatctagccatgggcaggttgaaggttgggtaacactaactggaggaccgaaccgactaatgttgaaaaattagcggatgacttgtggctgggggtgaaaggccaatcaaaccgggagatagctggttctccccgaaagctatttaggtagcgcctcgtgaattcatctccgggggtagagcactgtttcggcaagggggtcatcccgacttaccaacccgatgcaaactgcgaataccggagaatgttatcacgggagacacacggcgggtgctaacgtccgtcgtgaagagggaaacaacccagaccgccagctaaggtcccaaagtcatggttaagtgggaaacgatgtgggaaggcccagacagccaggatgttggcttagaagcagccatcatttaaagaaagcgtaatagctcactggtcgagtcggcctgcgcggaagatgtaacggggctaaaccatgcaccgaagctgcggcagcgacgcttatgcgttgttgggtaggggagcgttctgtaagcctgcgaaggtgtgctgtgaggcatgctggaggtatcagaagtgcgaatgctgacataagtaacgataaagcgggtgaaaagcccgctcgccggaagaccaagggttcctgtccaacgttaatcggggcagggtgagtcgacccctaaggcgaggccgaaaggcgtagtcgatgggaaacaggttaatattcctgtacttggtgttactgcgaaggggggacggagaaggctatgttggccgggcgacggttgtcccggtttaagcgtgtaggctggttttccaggcaaatccggaaaatcaaggctgaggcgtgatgacgaggcactacggtgctgaagcaacaaatgccctgcttccaggaaaagcctctaagcatcaggtaacatcaaatcgtaccccaaaccgacacaggtggtcaggtagagaataccaaggcgcttgagagaactcgggtgaaggaactaggcaaaatggtgccgtaacttcgggagaaggcacgctgatatgtaggtgaagcgacttgctcgtggagctgaaatcagtcgaagataccagctggctgcaactgtttattaaaaacacagcactgtgcaaacacgaaagtggacgtatacggtgtgacgcctgcccggtgccggaaggttaattgatggggtcagcgcaagcgaagctcttgatcgaagccccggtaaacggcggccgtaactataacggtcctaaggtagcgaaattccttgtcgggtaagttccgacctgcacgaatggcgtaatgatggccaggctgtctccacccgagactcagtgaaattgaactcgctgtgaagatgcagtgtacccgcggcaagacggaaagaccccgtgaacctttactatagcttgacactgaacattgagccttgatgtgtaggataggtgggaggctttgaagtgtggacgccagtctgcatggagccgaccttgaaataccaccctttaatgtttgatgttctaacgtggacccgtgatccgggttgcggacagtgtctggtgggtagtttgactggggcggtctcctcctaaagagtaacggaggagcacgaaggttggctaatcctggtcggacatcaggaggttagtgcaatggcataagccagcttgactgcgagcgtgacggcgcgagcaggtgcgaaagcaggtcatagtgatccggtggttctgaatggaagggccatcgctcaacggataaaaggtactccggggataacaggctgataccgcccaagagttcatatcgacggcggtgtttggcacctcgatgtcggctcatcacatcctggagctgaagtaggtcccaagggtatggctgttcgccatttaaagtggtacgcgagctgggtttagaacgtcgtgagacagttcggtccctatctgccgtgggcgctggagaactgaggggggctgctcctagtacgagaggaccggagtggacgcatcactggtgttcgggttgtcatgccaatggcactgcccggtagctaaatgcggaagagataagtgctgaaagcatctaagcacgaaacttgccccgagatgagttctccctgactccttgagagtcctgaaggaacgttgaagacgacgacgttgataggccgggtgtgtaagcgcagcgatgcgttgagctaaccggtactaatgaaccgtgaggcttaaccttacaacgccgaagctgttttggcggatgagagaagattttcagcctgatacagattaaatcagaacgcagaagcggtctgataaaacagaatttgcctggcggccgtagcgcggtggtcccacctgaccccatgccgaactcagaagtgaaacgccgtagcgccgatggtagtgtggggtctccccatgcgagagtagggaactgccaggcatcaaattaagcagtaagccggtcataaaaccggtggttgtaaaagaattcggtggagcggtagttcagtcggttagaatacctgcctgtcacgcagggggtcgcgggttcgagtcccgtccgttccgccaccctaattaggggcgtagttcaattggtagagcaccggtctccaaaaccgggtgttgggagttcgagtctctccgcccctgccagaaatcatccttagcgaaagctaaggattttttttatctgaaataaccctctccgaagtaaatccttctaccggcatccttgccagccattcatattaatacacttcatccagcacgttaattttcaaaagatcgcgaatcaacgcatttttatcgctattttgcagccatatggcataaagcggccgactaagtgttgtgctatcgacaacggtatgcaggccgccttttttacgcgcccagctgacgggtagccaggtgcaaccattaagcatcgcaatctgttgctgtgccagttcagcagaactggttgtcagaatgggcacttcgtcagcaccgatcaaacctgcctcatgctgttgaaaatctggcccccactcaagtcgcagataattaagatctccctttagtttactaggggcactggtataaagcgctaaagtgaaatatcccagcaactgactactaaattcgtccattttgggcgcttcagtggtaataagaagatcaagctggcgttcatgcagctgttttaccagagactgccgttgggcaattcgcgcttcgaactgtaagcctgtatgggcatcctgattttgatacaagcgtcccagccactgattaagcatacattcccacaagctggcgctggcaccgatagaaaactcgttatgtcgactggtatgcgccacctccttacgggcggcctgccaggtgctcatgagcgtttctgcataaggcagtagtttttcaccggcagcggttaaacggatattgtttctgtggcgggtgaaaaggttcacacccagttgattttccagttgtctgattcgaaagctcactgcactctgggtcagatagaggctttcagccgctcgaccaaagtgacgcgttcggctaacttccaggaaagtttttaacaattccgtatccacagtgctctccgcaaaattatttgtcgttatgatttaaatgttttgttttacactctgtcaagcgtaactaatactccgcgccataactagctcggtcaaagaattaggagcgtgcaggatggcggaaagctttacgacgactaatcgatatttcgacaataaacattatccacgtggattctctcgtcatggtgatttcaccatcaaagaggcacaactgcttgagcgtcatggttatgccttcaatgagttggatcttggcaaacgcgagccggttaccgaggaagagaaactcttcgtagcagtatgccgtggcgaacgtgagccagtgacagaagcagaacgcgtgtggtccaagtatatgacgcgtattaagcgtccaaaacgttttcacaccctttccggcggtaaaccgcaggttgaaggtgctgaagactacaccgattctgacgattaataaaaagggcgaaatgccctttttttatgtcagtagtttctgcagatggatgagcaaacggtcaatcgctcgatagctaactgcctcctgcaaatgctgacgtgtgataatgtcagactgatcaatatcagcaatggttcgtgcaactttcaataaccgctgccaggcacgaatgcttaaccccagatggatcagtgttccttccaaccacatcgcatcttcgctctcaagtttgcagaattggcgtatttccggactatccagccaggcattcagtttattctgccgcttaaattggcgctctctggcggccattacgcgttgtttaacggtggcgctgctttctcccggcactaccgttttactcaaaatgccggggggtggtaatgggatctccagactgagatcgaagcggtcgagaaagggcccgctgagccggttgagataacgtaatgtctgttctggcgtgcagcggttatggtttccctgataatgtccggtagggctgggattcatcgccgcaacaagctggaaacgggctggataggttatttttgctcgtgtgcgactaagatggatctgcccggattcaatcggctctcgcaaggcatccagtgtacgccgttcaaattcaggtagctcatcaagaaaaagcacgccgttatgcgccaggctaatttcaccgggccctggaattgcgccaccgcctaccatcgcagttaagcttgcactgtgatgaggactgcggaacgggcgctgccgccattgtttttgtacactttcagcatttaccagacttaatatcgcagcactctccagtgcctcttcattgcttaaatctggcaacaggccattaatacggctggcgagcattgttttacctgttcccggcggcccaatcagtaaaaggttgtgcccgccagcagcggtaatttccagtcctcgctttccttgttcctgaccgataacatcactgagatcatgttgtagcgcccgggatactgcatcagttggtttcgggcgttcgagagcgtgcttaccttccagaaacgcacagacagcttgcagatgatcggctatcaggcatccttcaccgttaattagccccacttcatcttcgttatctttcgcgacgataatttttctgccgctcttaatagcttcagttgcactggagattgcgccgggaacgccacgcagagcgcctgtaagcgccagttctccgactaattcatattcatctaacttattggctgtaagctgttcactggccgccagcaacgcaatggcgataggtaaatcatatcgtcccccttcttttggcagatcagctggagccaggttgatggtgatttttttcgccggatattcatatccgctattgataatggcgctgcgcacgcgatcgcgagcttcttttaccgttgtttctggtaagcccaccatcgttaagccgggtagacctttactgatatgtacctcaacagtgatcgggggcgcatttactcccagggctgcgcgggtatgaacaatactcagactcataagccctccttgagtcaccattatgtgcataagatatcgctgctgtagcccgctaattcgtgaattttagtggctgattcctgtttatttgtgcaagtgaagttgagttgttctggcggtggaatgatgctcgcaaaaatgcagcggacaaaggatgaactacgaggaagggaacaacattcatactgaaattgaatttttttcactcactattttatttttaaaaaacaacaatttatattgaaattattaaacgcatcataaaaatcggccaaaaaatatcttgtactatttacaaaacctatggtaactctttaggcattccttcgaacaagatgcaagaaaagacaaaatgacagcccttctacgagtgattagcctggtcgtgattagcgtggtggtgattattatcccaccgtgcggggctgcacttggacgaggaaaggcttaaagatcaagccttaacgaactaagacccccgcaccgaaaggtccgggggttttttttgaccttaaaaacataaccgaggagcagacaatgaataacagcacaaaattctgtttctcaagattcaggacggggaactaactatgaatggcgcacagtgggtggtacatgcgttgcgggcacagggtgtgaacaccgttttcggttatccgggtggcgcaattatgccggtttacgatgcattgtatgacggcggcgtggagcacttgctatgccgacatgagcagggtgcggcaatggcggctatcggttatgctcgtgctaccggcaaaactggcgtatgtatcgccacgtctggtccgggcgcaaccaacctgataaccgggcttgcggacgcactgttagattccatccctgttgttgccatcaccggtcaagtgtccgcaccgtttatcggcactgacgcatttcaggaagtggatgtcctgggattgtcgttagcctgtaccaagcacagctttctggtgcagtcgctggaagagttgccgcgcatcatggctgaagcattcgacgttgcctgctcaggtcgtcctggtccggttctggtcgatatcccaaaagatatccagttagccagcggtgacctggaaccgtggttcaccaccgttgaaaacgaagtgactttcccacatgccgaagttgagcaagcgcgccagatgctggcaaaagcgcaaaaaccgatgctgtacgttggcggtggcgtgggtatggcgcaggcagttccggctttgcgtgaatttctcgctgccacaaaaatgcctgccacctgtacgctgaaagggctgggcgcagtagaagcagattatccgtactatctgggcatgctggggatgcacggcaccaaagcggcaaacttcgcggtgcaggagtgtgacctgctgatcgccgtgggcgcacgttttgatgaccgggtgaccggcaaactgaacaccttcgcgccacacgccagtgttatccatatggatatcgacccggcagaaatgaacaagctgcgtcaggcacatgtggcattacaaggtgatttaaatgctctgttaccagcattacagcagccgttaaatcaatgactggcagcaacactgcgcgcagctgcgtgatgaacattcctggcgttacgaccatcccggtgacgctatctacgcgccgttgttgttaaaacaactgtcggatcgtaaacctgcggattgcgtcgtgaccacagatgtggggcagcaccagatgtgggctgcgcagcacatcgcccacactcgcccggaaaatttcatcacctccagcggtttaggtaccatgggttttggtttaccggcggcggttggcgcacaagtcgcgcgaccgaacgataccgttgtctgtatctccggtgacggctctttcatgatgaatgtgcaagagctgggcaccgtaaaacgcaagcagttaccgttgaaaatcgtcttactcgataaccaacggttagggatggttcgacaatggcagcaactgttttttcaggaacgatacagcgaaaccacccttactgataaccccgatttcctcatgttagccagcgccttcggcatccatggccaacacatcacccggaaagaccaggttgaagcggcactcgacaccatgctgaacagtgatgggccatacctgcttcatgtctcaatcgacgaacttgagaacgtctggccgctggtgccgcctggcgccagtaattcagaaatgttggagaaattatcatgatgcaacatcaggtcaatgtaagcgctcgcttcaatccagaaaccttagaacgtgttttacgcgtggtgcgtcatcgtggtttccacgtctgcagtatgaatatggccgccgccagcgatgcacaaaatataaatatcgaattgaccgttgccagcccacggagcgtcgacttactgtttagtcagttaaataaactggtggacgtcgcacacgttgccatctgccagagcacaaccacaagtcaacaaatccgcgcctgagcgcaaaaggaatataaaaatgaccacgaagaaagctgattacatttggttcaatggggagatggttcgctgggaagacgcgaaggtgcatgtgatgagccacgcgctgcactatggcactagcgtttttgaaggcatccgttgctacgacagccacaaaggaccggttgtattccgccatcgtgagcatatgcagcgtctgcatgactccgccaaaatctatcgcttcccggttagccagagcattgatgagctgatggaagcttgtcgtgacgtgatccgcaaaaacaatctcaccagcgcctatatccgtccgctgatcttcgtcggtgatgttggcatgggagtaaacccgccagcgggatacagtaccgacgtgattatcgctgctttcccgtggggagcgtatctgggcgcagaagcgctggagcaggggatcgatgcgatggtttcctcctggaaccgcgcagcaccaaacaccatcccgacggcggcaaaagccggtggtaactacctctcttccctgctggtgggtagcgaagcgcgccgccacggttatcaggaaggtatcgcgctggatgtgaacggttatatctctgaaggcgcaggcgaaaacctgtttgaagtgaaagatggtgtgctgttcaccccaccgttcacctcctccgcgctgccgggtattacccgtgatgccatcatcaaactggcgaaagagctgggaattgaagtacgtgagcaggtgctgagccgcgaatccctgtacctggcggatgaagtgtttatgtccggtacggcggcagaaatcacgccagtgcgcagcgtagacggtattcaggttggcgaaggccgttgtggcccggttaccaaacgcattcagcaagccttcttcggcctcttcactggcgaaaccgaagataaatggggctggttagatcaagttaatcaataaatacaaaaaatgggacggcacgcaccgtcccatttacgagacagacactgggagtaaataaagtatgcctaagtaccgttccgccaccaccactcatggtcgtaatatggcgggtgctcgtgcgctgtggcgcgccaccggaatgaccgacgccgatttcggtaagccgattatcgcggttgtgaacagcttcacccaatttgtaccgggtcacgtccatctgcgcgatctcggtaaactggtcgccgaacaaattgaagcggctggcggcgttgccaaagagttcaacaccattgcggtggatgatgggattgccatgggccacggggggatgctttatagtctgccatctcgcgaactgatcgctgattccgttgagtatatggtcaacgcccactgcgccgacgccatggtctgcatctctaactgcgacaaaatcaccccggggatgctgatggcttccctgcgcctgaatattccggtgatctttgtttccggcggcccgatggaggccgggaaaaccaaactttccgatcagatcatcaagctcgatctggttgatgcgatgatccagggcgcagacccgaaagtatctgactcccagagcgatcaggttgaacgttccgcgtgtccgacctgcggttcctgctccgggatgtttaccgctaacagtatgaactgcctgaccgaagcgctgggcctgagccagccgggcaacggcagcctgctggcaacccacgccgaccgtaagcagctgttccttaatgctggtaaacgcattgttgaattgaccaaacgttattacgagcaaaacgacgaaagtgcactgccgcgtaatatcgccagtaaggcggcgtttgaaaacgccatgacgctggatatcgcgatgggtggaagcactaacaccgtacttcacctgctggcggcggcgcaggaagcggaaatcgacttcaccatgagtgatatcgataagctttcccgcaaggttccacagctgtgtaaagttgcgccgagcacccagaaataccatatggaagatgttcaccgtgctggtggtgttatcggtattctcggcgaactggatcgcgcggggttactgaaccgtgatgtgaaaaacgtacttggcctgacgttgccgcaaacgctggaacaatacgacgttatgctgacccaggatgacgcggtaaaaaatatgttccgcgcaggtcctgcaggcattcgtaccacacaggcattcagccaagattgccgttgggatacgctggacgacgatcgcgccaatggctgtatccgcagcctggaacacgcctacagcaaagacggcggcctggcggtgctctacggtaactttgcggaaaacggctgcatcgtgaaaacggcaggcgtcgatgacagcatcctcaaattcaccggcccggcgaaagtgtacgaaagccaggacgatgcggtagaagcgattctcggcggtaaagttgtcgccggagatgtggtagtaattcgctatgaaggcccgaaaggcggtccggggatgcaggaaatgctctacccaaccagcttcctgaaaagtatgggtctcggcaaagcctgtgcgctgatcaccgacggtcgtttctctggtggcacctctggtctttccatcggccacgtcagtccggaagcggcaagcggcggcagcattggcctgattgaagatggtgacctgatcgctatcgacatcccgaaccgtggcattcagttacaggtaagcgatgccgaactggcggcgcgtcgtgaagcgcaggacgctcgaggtgacaaagcctggacgccgaaaaatcgtgaacgtcaggtctcctttgccctgcgtgcttatgccagcctggcaaccagcgccgacaaaggcgcggtgcgcgataaaagcaaactggggggttaataatggctgacagccaacccctgtccggtgctccggaaggtgccgaatatttaagagcagtgctgcgcgcgccggtttacgaggcggcgcaggttacgccgctacaaaaaatggaaaaactgagcagccgtcttgataacgtcattctggtgaagcgcgaagatcgccagccagtgcacagctttaagctgcgcggcgcatacgccatgatggcgggcctgacggaagaacagaaagcgcacggcgtgatcactgcttctgcgggtaaccacgcgcagggcgtcgcgttttcttctgcgcggttaggcgtgaaggccctgatcgttatgccaaccgccaccgccgacatcaaagtcgacgcggtgcgcggcttcggcggcgaagtgctgctccacggcgcgaactttgatgaagcgaaagccaaagcgatcgaactgagtcagcagcaggggttcacctgggtgccgccgttcgaccatccgatggtgattgccgggcaaggcacgctggcgctggaactgctccagcaggacgcccatctcgaccgcgtatttgtgccagtcggcggcggcggtctggctgctggcgtggcggtgctgatcaaacaactgatgccgcaaatcaaagtgatcgccgtagaagcggaagactccgcctgcctgaaagcagcgctggatgcgggtcatccggttgatctgccgcgcgtagggctatttgctgaaggcgtagcggtaaaacgcatcggtgacgaaaccttccgtttatgccaggagtatctcgacgacatcatcaccgtcgatagcgatgcgatctgtgcggcgatgaaggatttattcgaagatgtgcgcgcggtggcggaaccctctggcgcgctggcgctggcgggaatgaaaaaatatatcgccctgcacaacattcgcggcgaacggctggcgcatattctttccggtgccaacgtgaacttccacggcctgcgctacgtcagtgaacgctgcgaactgggcgaacagcgtgaagcgttgttggcggtgaccattccggaagaaaaaggcagcttcctcaaattctgccaactgcttggcgggcgtagcgtcaccgagttcaactaccgttttgccgatgccaaaaacgcctgcatctttgtcggtgtgcgcctgagccgcggcctcgaagagcgcaaagaaattttgcagatgctcaacgacggcggctacagcgtggttgatctctccgacgacgaaatggcgaagctacacgtgcgctatatggtcggcggacgtccaagccatccgttgcaggaacgcctctacagcttcgaattcccggaaagtccgggcgcgctgctgcgcttcctcaacacgctgggtacgtactggaacatttctttgttccactatcgcagccatggcaccgactacgggcgcgtactggcggcgttcgaacttggcgaccatgaaccggatttcgaaacccggctgaatgagctgggctacgattgccacgacgaaaccaataacccggcgttcaggttctttttggcgggttaaggaaaaatgcctgatagcgcttcgcttatcaggcctacccgcgcgacaacgtcatttgtggttcggcaaaatcttccagaatgcctcaattagcggctcatgtagccgctttttctgcgcacacacgcccagctcaaacggcgttttctcatcgctgcgctctaaaatcatcacgcggttacgcaccggttcggggctgttttccagcaccacttccggcaacaatgccacgccacagccgagtgccaccatgcttaccatcgcttcatgcccgccaaccgtggcgtaaatcatcgggttactgattttattgcgtcgaaaccacagttcaatgcggcggcgtaccggcccctgatcggccataataaacggcaccgtactccagtccggcttctctacgctcacctgattacgcaccgggcagggcagcgcgggggcaatcagcactactgccagattctccagcatgctaaacgccactgcgccgggcaaggtttccggtttacccgcaatcgccagatccgcttcaccagtgaccaccttttccatcgcatctgccgcatcaccagtagtaagtttaatctccacgctcgggtgttccgcgcggaagcgatccagaatcggcggcagatggctgtaggcagcggtcacgctgcagaagatatgtaattcgccagagaggctcggcccttgctgatcgatggtgtggcgcaactgctgatactgcaacagcgtttgctgggcgaaaacgcgcagctcttcgcccgcttcagtcagcgtcaccgtgcggttatcgcgcacaaacagcggctgaccgagatcttcttccaggcgctgaatctgccgactgagcgtggatgggctaacgtgcatcgcccgcgcgctgcggccaaaatggcggctttccgccagatgcaggaaggttttcagatcgcgtaaatccacagggacagccctcgatgttgacgttgcaaaaattgcaatgtgacgttgtgaatatatcaatttccgcaataaatttcctgtcatatagtgaattcaatctcgcaaacgcgaaccgaacaataagaagcacaacatcacgaggaatcaccatggctaactacttcaatacactgaatctgcgccagcagctggcacagctgggcaaatgtcgctttatgggccgcgatgaattcgccgatggcgcgagctaccttcagggtaaaaaagtagtcatcgtcggctgtggcgcacagggtctgaaccagggcctgaacatgcgtgattctggtctcgatatctcctacgctctgcgtaaagaagcgattgccgagaagcgcgcgtcctggcgtaaagcgaccgaaaatggttttaaagtgggtacttacgaagaactgatcccacaggcggatctggtgattaacctgacgccggacaagcagcactctgatgtagtgcgcaccgtacagccactgatgaaagacggcgcggcgctgggctacagccacggtttcaacatcgtcgaagtgggcgagcagatccgtaaagatatcaccgtagtgatggttgcgccgaaatgcccaggcaccgaagtgcgtgaagagtacaaacgtgggttcggcgtaccgacgctgattgccgttcacccggaaaacgatccgaaaggcgaaggcatggcgattgccaaagcctgggcggctgcaaccggtggtcaccgtgcgggtgtgctggaaagctccttcgttgcggaagtgaaatctgacctgatgggcgagcaaaccatcctgtgcggtatgttgcaggctggctctctgctgtgcttcgacaagctggtggaagaaggtaccgatccagcatacgcagaaaaactgattcagttcggttgggaaaccatcaccgaagcactgaaacagggcggcatcaccctgatgatggaccgtctctctaacccggcgaaactgcgtgcttatgcgctttctgaacagctgaaagagatcatggcacccctgttccagaaacatatggacgacatcatctccggcgaattctcttccggtatgatggcggactgggccaacgatgataagaaactgctgacctggcgtgaagagaccggcaaaaccgcgtttgaaaccgcgccgcagtatgaaggcaaaatcggcgagcaggagtacttcgataaaggcgtactgatgattgcgatggtgaaagcgggcgttgaactggcgttcgaaaccatggtcgattccggcatcattgaagagtctgcatattatgaaagtctgcacgagctgccgctgattgccaacaccatcgcccgtaagcgtctgtacgaaatgaacgtggttatctctgataccgctgagtacggtaactatctgttctcttacgcttgtgtgccgttgctgaaaccgtttatggcagagctgcaaccgggcgacctgggtaaagctattccggaaggcgcggtagataacgggcaactgcgtgatgtgaacgaagcgattcgcagccatgcgattgagcaggtaggtaagaaactgcgcggctatatgacagatatgaaacgtattgctgttgcgggttaagtgcgcgctgatgccctcaccccgaccctctcccacagggagagggagaaaacactcaaggccttctcctggagaaggccttgctattagttgcggtacagcaccttaatgatgtgatatccgaactgggtgtgcagcgggccggtcggctccagtaccggacaagagaaaaccactttatcgaacgccggaaccatctgaccctggcggaattcacctaaatcaccgccgcgtttgccacttgggcaaatggagtgtttcttcgccagcttgccgaaatcggccccgttcttaatctgctcgagaagatccagagccagtttctcttcttttacaaggatatgcagtgctgctgctgtttttgccatgatcgtgccttgagtgaataattgtcaggcggcgattttagcatgatccgcagatgctaacgtaattgtcagtcagggagtggctggtacatatatggcaaaagcccggaaaatccgggcttcgcaggtccctcaaggggagaaaacttagggcctctatgggctacaaagtcattatcggggatggttattttattgtcaatttatgaggcttatggcattgatactcttgatgaccgccctctgtatgtctgcaaccaactcatgtggcaaacattgattaagataccctctgtaagtccttgctctgtttaatctgtttcgactgacttgttgtaccaggtcggctttggcccaacgaatctgctgatcaaagaattgcaggtcattgataacattactggctatttcaacatgcattccacgttttaacttgtctggtcggctgtggttgataatggaacgacgatgcatgcgttgccattaatttttccgttgagcacgacaactaacctgttttttatcatttcaggaggaatgcggccatcgtaatacgtcgtgctgaacggtccattttggctaacaggatagttaccaaagttgcattccagtatttcaccaaccttagggctgaaattaatcgccacgagtaaacctctccttagtaaactctgaaaaagtaataacacaacgttacgacccgatattttctaagtctaatggattcacgatgaactccgatttcggtcttctctctctgatttaaacatccgcagccaaccggttagcggcttacacgcggtcacattcaaatgcgattctgctacaatcctccccccgttcgaagattgagcaatacacctatgcgtctaaaccccggccaacaacaagctgtcgaattcgttaccggcccctgcctggtgctggcgggcgcgggttccggtaaaactcgtgttatcaccaataaaatcgcccatctgatccgcggttgcggttatcaggcgcggcacattgcggcggtgacctttactaataaagcagcgcgcgagatgaaagagcgtgtagggcagacgctggggcgcaaagaggcgcgtgggctgatgatctccactttccatacgttggggctggatatcatcaaacgcgagtatgcggcgcttgggatgaaagcgaacttcagcttgtttgacgataccgatcagcttgctttgcttaaagagttgaccgaggggctgattgaagatgacaaagttctcctgcaacaactgattagcaccatctctaactggaagaatgatctcaaaacaccgtcccaggcggcagcaagtgcgattggcgagcgggaccgtatttttgcccattgttatgggctgtatgatgcacacctgaaagcctgtaacgttctcgacttcgatgatctgattttattgccgacgttgctgctgcaacgcaatgaagaagtccgcaagcgctggcagaacaaaattcgctatctgctggtggatgagtatcaggacaccaacaccagccagtatgagctggtgaaactgctggtgggcagccgcgcgcgctttaccgtggtgggtgacgatgaccagagcatctactcctggcgcggtgcacgtccgcaaaacctggtgctgctgagtcaggattttccggcgctgaaggtgattaagcttgagcagaactatcgctcttccgggcgtattctgaaagcggcgaacatcctgatcgccaataacccgcacgtctttgaaaagcgtctgttctccgaactgggttatggcgcggagctaaaagtattaagcgcgaataacgaagaacatgaggctgagcgcgttactggcgagctgatcgcccatcacttcgtcaataaaacgcagtacaaagattacgccattctttatcgcggtaaccatcagagccgggtgtttgaaaaattcctgatgcaaaaccgcatcccgtacaaaatatctggtggtacgagctttttctctcgtcctgaaatcaaggacttgctggcttatctgcgcgtgctgactaacccggacgatgacagcgcatttctgcgtatcgttaacacgccgaagcgagagattggcccggctacgctgaaaaagctgggtgagtgggcgatgacgcgcaataaaagcatgtttaccgccagctttgatatgggcctgagtcagacgcttagcggacgtggttatgaagcattgacccgcttcactcactggttggcagaaatccagcgtctggcggagcgggagccgattgccgcggtgcgtgatctgatccatggcatggattatgaatcctggctgtacgaaacaagccccagcccgaaagccgccgaaatgcgcatgaagaacgtcaaccaactgtttagctggatgacggagatgctggaaggcagtgaactggatgagccgatgacgctcacccaggtggtgacgcgctttactttgcgcgacatgatggagcgtggtgagagtgaagaagagctggatcaggtgcaactgatgactctccacgcgagcaaagggctggagtttccttatgtctacatggtcggtatggaagaagggtttttgccgcaccagagcagcatcgatgaagataatatcgatgaggagcggcggctggcctatgtcggcattacccgcgcccagaaggaattgacctttacgctgtgtaaagaacgccgtcagtacggcgaactggtgcgcccggagccgagccgctttttgctggagctgccgcaggatgatctgatttgggaacaggagcgcaaagtggtcagcgccgaagaacggatgcagaaagggcaaagccatctggcgaatctgaaagcgatgatggcggcaaaacgagggaaataatcaaggccggaaaagatgcgtcagcatcgcatccggcacttactcattaatgcacttccagcggccagtggacatagctctgccactggctttcctgagcaataatctctttacccagcggatgttgggttagccaaccttgcggaagcgtcaaggtcaacagttcatggttagcctgtaatgtcatctctggcacgagatcgtcacggcgacggctggcaaaaatgatggccaggcgtagtaaacggcagagttgttctgcgacgcgcggcggtacggcattttgctgatgcaggctactgagatcgaccggattagtctggttgagcagtagcgtcgccagcaattttttctgtgcgggggtaaaaccgggaagatccagattacgcaccagataagcagcgtgttgcggcgcttgtttgaagtcaacgctcaggccgatttcatgaagctgacaggcgctgatgagcaaatcgcggcttattgcttcaagatgccattcgttttccacctgatcgaagaagttagccgcaactttggctacgcgctgtgcctgatcaatatcgatcataaagcggcgttgaatattacgcagcgtacggctgcgaatatcctgctcgacggccagatgcaacatgccgtagaccaggccttcacgcagcgcaccgcccgccagggtcatacactgaatattcagttcggtaaaaatggcgatcaggatcgccagaccactcgggaacactaacgcacgttccagcgtcagcccgtcaatctccagttcctccagccgaccgcaatgaatggctcgctgtttcaattgctgcaacttttccagggtaatgcgttcatccatcccctgtgccatcatgatttcctgtaacgcctgcacggtgccggaagcaccaacgcacactttccagccgtgataccgtaattcatcggcaaccggacgtaacacttcgcgtgccgctttttctgcagcatcaaaattttcctgccccagattacgatcggcaaaatagcgttccagccaggtgacgcagcccatgctcaggctgaacaagctggtggtttgtgcacccgtgccggttaccagttcagtactggctccgcctatatccaccaccaggcgctgatcggcaccaccagtggtgtgagcaacgccctgataaatcagacgtgcttcctcttcaccgctgatcacctgtaccggacaaccgagaatttcctgcgctttggcaataaaatcacccgcattgacggcaaggcgtaacgtcgccgtagcgacaacgcgaatttggctgggaggaatatcttgcagacgttcagcaaacaggcgcaaacattgccaaccgcgctccattgcttcattggagagggcattttcgctattcaggccagcagccagacgcactttgcgttttattcgcgtcagcgtctggatgcttccagccacctcgcgcacaaccagcatatgaaaactattgctaccgagatcaatggctgcatacaggctgctggtggaacccatactcttcatccttcaatctgtctctgtgttggctgcattctttcacctgaatcacttactacagtaagctcatcgggattcattctcttgccatcttgatacagtttgaatgattttgagtatgacattttttatttaaccactacgacgacgattacgcggagcgccagtacgacgcggaccattgcctgtgcgcgggcgcgtgaggcgcagcggttttggcagatcggtcatcaatgcgtccggattgtatttgcttaccggaatactgtgaccaatataggtctcaatagcaggcaaattcaatgcatactcttcacacgccaggctgatagagtgaccgcttgcgcctgcgcgacctgtacgaccaatacggtgaacgtaatcttcacagtcatcgggtaaatcgtagttaaagacgtgcgtcactgccggaatatgcaaaccacgcgcggcaacgtcggtggcaaccagaatatccagatcgccacgggtaaattcatcaagaatacgcagacgttttttctgcgcgacatcgcctgtcaataaaccgacacgatgaccatctgctgccaggtggccccagatctcttcacaacggtgtttggtgttggcgaaaataatcgctctgtctggccactcttcttcgatcagcgtttgcagcaaacgcattttttcttcgttagaagggtagaaaagctcttctttaatacggtggcccgttttctgttccggttccacttcaatatattcggcattgttcatctgctcgaacgccagttcacgtacccggtagctaagcgtggcggagaacagcatgttgaggcgctggtttgcaggcggcatacggcggaacagccagcggatatctttaataaagcccagatcgtacatgcgatcggcttcgtccagtaccaccacctgaatggcaccgaggttaatgtggttctgcttggcgtagtcaattaaacgccccgtggtgccaatcagaatgtcaacgccgctttccagcactttcagctgtttgtcgtagccatcaccaccgtaagccagacccagcttcaggccagtagcttccgccagcggttctgcgtcggcatggatctgcacggcaagttcacgcgtcggtgccataattaaggcacgcggctgattcaccttgcgatcggcaatcgcaggatgagagagaagataatgaaacgtactcgtaagaaacgccatcgttttcccggtaccggtttgcgcctgcccggctacgtcacgacccgccagcgtcagcggaagggccagtgcctgaatgggcgtacagttatgaaacccttttttttcaagggcttctacaaccttcggatgcagggcgaagtcggaaaacttctgttctgttaaatgtgttttgctcatagtgtggtagaatatcagcttactattgctttacgaaagcgtatccggtgaaataaagtcaacctttagttggttaatgttacaccaacaacgaaaccaacacgccaggcttattcctgtggagttatatatgagcgataaaattattcacctgactgacgacagttttgacacggatgtactcaaagcggacggggcgatcctcgtcgatttctgggcagagtggtgcggtccgtgcaaaatgatcgccccgattctggatgaaatcgctgacgaatatcagggcaaactgaccgttgcaaaactgaacatcgatcaaaaccctggcactgcgccgaaatatggcatccgtggtatcccgactctgctgctgttcaaaaacggtgaagtggcggcaaccaaagtgggtgcactgtctaaaggtcagttgaaagagttcctcgacgctaacctggcgtaagggaatttcatgttcgggtgccccgtcgctaaaaactggacgcccggcgtgagtcatgctaacttagtgttgacttcgtattaaacataccttattaagtttgaatcttgtaatttccaacgcttcccgttttatcttaaatgcgaagtgaacagatttctggcagcagtctcaatccgtcttgtcgtttcagttctgcgtactctcctgtgaccaggcagcgaaaagacatgagtcgatgaccgtaaacaggcatggatgatcctgccataccattcacaacattaagttcgagatttaccccaagtttaagaactcacaccactatgaatcttaccgaattaaagaatacgccggtttctgagctgatcactctcggcgaaaatatggggctggaaaacctggctcgtatgcgtaagcaggacattatttttgccatcctgaagcagcacgcaaagagtggcgaagatatctttggtgatggcgtactggagatattgcaggatggatttggtttcctccgttccgcagacagctcctacctcgccggtcctgatgacatctacgtttcccctagccaaatccgccgtttcaacctccgcactggtgataccatctctggtaagattcgcccgccgaaagaaggtgaacgctattttgcgctgctgaaagttaacgaagttaacttcgacaaacctgaaaacgcccgcaacaaaatcctctttgagaacttaaccccgctgcacgcaaactctcgtctgcgtatggaacgtggtaacggttctactgaagatttaactgctcgcgtactggatctggcaagtcctatcggtcgtggtcagcgtggtctgattgtggcaccgccgaaagccggtaaaaccatgctgctgcagaacattgctcagagcattgcttacaaccacccggattgtgtgctgatggttctgctgatcgacgaacgtccggaagaagtaaccgagatgcagcgtctggtaaaaggtgaagttgttgcttctacctttgacgaacccgcatctcgccacgttcaggttgcggaaatggtgatcgagaaggccaaacgcctggttgagcacaagaaagacgttatcattctgctcgactccatcactcgtctggcgcgcgcttacaacaccgttgttccggcgagtggtaaagtgttgaccggtggtgtggatgccaacgccctgcatcgtccgaaacgcttctttggtgcggcgcgtaacgtggaagagggcggcagcctgaccattatcgcgacggcgcttatcgataccggttctaaaatggacgaagttatctacgaagagtttaaaggtacaggcaacatggaactgcacctctctcgtaagatcgctgaaaaacgcgtcttcccggctatcgactacaaccgttctggtacccgtaaagaagagctgctcacgactcaggaagaactgcagaaaatgtggatcctgcgcaaaatcattcacccgatgggcgaaatcgatgcaatggaattcctcattaataaactggcaatgaccaagaccaatgacgatttcttcgaaatgatgaaacgcagttaaatttgtcttatgccaaaaacgccacgtgtttacgtggcgttttgcttttatatctgtaatcttaatgccgcgctggcgatgttaggaaaattcctggaatttgctggcatgttatgcaatttgcatatcaaatggttaatttttgcacaggactggtgggtttggaacggactttcccttctgaataaaggtcttcgtggttatacttctgctaataattttctctgagagcatgcattgtgaatttactgacagtgagtactgatctcatcagtatttttttattcacgacactgtttctgttttttgcccgtaaggtggcaaaaaaagtcggtttagtggataaaccaaacttccgcaaacgtcaccagggattgatacctctcgttggggggattagcgtttacgcagggatttgcttcacgttcggaattgtcgattactatattccgcatgcatctctctatctcgcttgtgccggtgtgcttgttttcattggcgcgctggatgaccgttttgatatcagcgtaaaaatccgtgccaccatacaggccgctgttggcattgttatgatggtgttcggcaagctttatctcagtagcctgggttatatctttggctcctgggagatggtgctcggaccgtttggttacttcctgacgctatttgccgtctgggcggccattaatgcgttcaacatggttgatggcattgatggcttgctgggcgggttgtcctgcgtcagctttgcagcaatcggtatgattttgtggttcgacgggcaaaccagcctcgcaatctggtgctttgcgatgatcgccgccatcctgccatacatcatgcttaaccttggtatcctgggtcgccgctacaaagtctttatgggtgatgcgggcagtacgctgattggttttaccgttatctggatcctgctcgaaacgacccagggcaaaacccatcccatcagcccggttaccgctttgtggataatcgccattccgctaatggatatggtggcgattatgtaccgtcgcctgcgtaaaggcatgagcccattctctcctgaccgtcagcatattcaccatttgatcatgcgtgccgggtttacttcccgtcaggcgtttgtgctgattacccttgccgcagcactgctcgcttccattggcgtgctggcagaatattctcattttgtcccggagtgggtcatgctggtgctctttttgctagcattcttcctctatggatattgcattaagcgtgcctggaaagttgctcgctttattaagcgcgtaaaacgcagactgcgtagaaatcgtggtggcagccccaatttaaccaaataaatgaggatgtgatgacacaaccaatgcctgggaaaccggccgaagacgctgaaaatgaactggatattcgtgggttgtttcgtaccttgtgggctgggaagctatggattattggcatggggctggcgtttgcgttaatcgcgctggcgtatacgttttttgctcgtcaggagtggagcagcacggcgattaccgatcgtccaacggtgaatatgctggggggatattacagccagcagcaatttttgcgtaacctggatgtccgtagtaacatggcttctgccgaccaaccaagcgtcatggacgaagcctataaagagtttgttatgcaactggccagctgggatacccgcagagagttctggctgcaaaccgactattacaaacagcggatggtgggcaacagcaaagccgatgcggcgttgctggatgaaatgattaacaacatccagtttatccccggagactttacccgcgcggtcaatgacagcgtgaagcttattgccgaaaccgcgcctgacgctaataacctgttacgtcagtatgttgcttttgccagccagcgtgcagccagccatctgaatgatgagctgaaaggcgcatgggcggcgcgtaccatccagatgaaagctcaggtgaagcgtcaggaagaggtggcgaaagccatctacgaccgccggatgaacagcattgagcaggcgctgaaaattgctgagcagcataatattagccgcagtgcgacagatgtacctgccgaggaattacctgatagtgaaatgttcctgcttgggcgtccaatgcttcaggctcgactggaaaatttacaggccgtcggtccggcctttgatctcgactatgatcagaatcgggccatgttaaacaccctgaatgttggtccaaccctggatccgcgttttcagacctatcgctatttgcgtacgccggaagaaccggtaaaacgcgatagcccacgtcgtgccttcctgatgattatgtggggcattgtcggggggctgatcggggctggtgtcgcattaacccgccgttgcagcaaataacaacactgctgcggtgagcgcaaaggcgctcgccgcttattcgaagagaatcgatgtgaaagtactgactgtatttggtacgcgcccggaagccatcaagatggcgccgttggtgcatgcgttggcaaaagatcctttttttgaggctaaagtttgcgtcactgcgcagcatcgggagatgctcgatcaggtgctgaaactcttttccattgtacctgactacgatctcaacataatgcagccaggacagggcctgacagagataacctgtcggattctggaagggctaaaacctattcttgccgagttcaaaccagacgtcgtgctggttcacggcgatacgacgacgacgctggcaaccagcctggcggcgttttatcagcgtattcctgttggtcacgttgaggctggtctgcgcacgggcgatctctatagcccgtggccggaagaggctaaccgtacattgaccgggcatctggcgatgtatcacttctctccaaccgaaacttcccggcaaaacttgctgcgtgaaaacgttgcggatagccgaatcttcattaccggtaatacagtcattgatgcactgttatgggtgcgtgaccaggtgatgagcagcgacaagctgcgtagtgaactggcggcaaattacccgtttatcgaccccgataaaaagatgattctggtgaccggtcacaggcgtgagagtttcggtcgtggctttgaagaaatctgccacgcgctggcagacatcgccaccacgcaccaggacatccagattgtctatccggtgcatctcaacccgaacgtcagagaaccggtcaatcgcattctggggcatgtgaaaaatgtcattctgatcgatccccaggagtatttaccgtttgtctggctgatgaaccacgcctggctgattttgaccgacagtggcggcattcaggaagaagcgcctagcctggggaaacctgtgctggtgatgcgcgataccactgagcgtccggaagcggtgacggcgggtacggtgcgtctggtaggcacggataagcagcgaattgtcgaggaagtgacgcgtcttttaaaagacgaaaacgaatatcaagctatgagccgcgcccataacccgtatggtgatggtcaggcatgctctcgcattctggaagcgttaaaaaataatcggataagtctatgagttttgcgaccatttctgttatcggactgggttatatcgggctgccaacggcagcagcgtttgccagtcggcaaaaacaggtaattggtgtcgatatcaaccaacatgcggttgataccatcaatcgtggcgaaatccatatcgtcgaacctgatttggcgagtgtagtaaaaactgccgtagaaggcggttttttacgagcgagcacgacgccagttgaagcggatgcctggctgattgctgtacccacgccgtttaagggcgatcatgagccagatatgacctacgttgaaagcgctgctcgctccattgcgccagtgctgaaaaaaggcgcgctggtgatccttgaatccaccagcccggtggggagtaccgagaagatggcagaatggttagcagagatgcgtccggatctcactttcccgcagcaggtgggcgagcaggcggacgtcaacattgcttactgcccggaacgcgtgttaccaggacaggtaatggtcgagctgattaaaaacgatcgcgtgattggtggtatgacgccggtttgtagcgcccgcgccagcgaactgtacaaaattttcctcgaaggtgagtgtgtcgtcactaacagccggacggcggaaatgtgtaagctcaccgaaaacagcttccgcgatgtgaatatcgcttttgctaatgaattgagcctgatttgtgccgatcaggggattaacgtctgggaactgattcgcctggcgaatcgtcaccctcgcgttaatattcttcagcctggccctggcgtgggcggtcactgcattgctgttgatccgtggtttatcgtggcacagaacccccagcaggcgcggcttatccgtaccgcgcgcgaagtgaacgatcacaaaccgttctgggttatcgatcaggtgaaagcggcggtggctgattgcctggcggctaccgataaacgcgccagtgaactgaaaatcgcctgctttggtctggcgtttaaaccgaatattgatgacctgcgcgaaagcccggcgatggaaatcgctgaactgatcgcccagtggcatagcggcgaaactctggttgttgagcctaacatccaccagttgccgaaaaaactgaccgggctttgtactctggcgcagcttgacgaggcgctggcaacggcagacgtgctggtgatgctggtcgatcatagtcagttcaaagttatcaatggcgacaatgtccatcagcagtatgtcgtcgatgccaaaggagtctggcgctgatgagaaaaattctgataacaggtggtgccgggtttattggcagcgcgctggtgcgttatatcatcaacgaaacgagcgacgcggtggtagtggtcgataagctgacctacgccggaaacctgatgagcctggcaccggtcgcgcaaagcgagcgctttgcctttgagaaagttgatatctgcgatcgggcagaactggcacgcgtattcactgagcatcagccagactgtgtcatgcatctggcagccgaaagccatgttgaccgttctattgacggcccggcagcgtttattgaaaccaacattgtcgggacttatacattgcttgaagcggcgcgggcttactggaatgcgctgacggaagataaaaaaagtgcgttccgttttcatcatatctccactgacgaagtatatggtgacctgcacagcacggatgatttcttcaccgaaaccacgccgtatgcgccgagcagcccttattccgcgagtaaagccagcagcgaccatctggtgcgcgcctggctgcggacctatggtctgccgacgcttatcaccaactgcagcaataactacggcccttaccactttccggaaaaactgatcccgctgatgatcctcaacgcgctggcgggtaaaagcctgccggtatatggcaacgggcagcaaatccgtgactggctgtatgtggaagatcacgcccgcgcgctgtattgcgtggcgaccaccgggaaagtcggtgaaacctataatattggtggtcacaacgagcgtaagaatctcgatgttgtggaaaccatttgcgagctgctggaagaactggctccgaacaagccgcacggcgtggcgcactatcgtgacctgatcacctttgtcgctgaccgtccggggcatgatctgcgttatgccattgatgctagcaaaattgcccgtgaacttggctggctgccgcaggaaacctttgaaagtggaatgcgtaaaacggttcagtggtatctggctaatgaaagctggtggaagcaggtgcaggacggcagctatcagggcgagcgtttaggtctgaaaggctaattttcagcggaggcaaacatgaaaggtattatcctggcgggcggttccggcacccgattgcatccgattacgcgcggcgtaagcaagcaactgttgccgatttacgataagccaatgatttactatccgctgagcgtgctgatgctggccggtatccgcgaaattctcatcatcactacgccggaagataaaggttatttccagcgcctgctgggcgatggtagtgagttcggtatccagctggaatatgccgaacagcccagcccggacggtctggcgcaggcctttatcatcggtgaaaccttccttaatggtgaaccttcttgtctggtgctgggcgataacatcttcttcggtcagggcttcagtccgaagctgcgtcatgttgcggcgcgcaccgaaggggcgacggtttttggctatcaggtgatggacccggaacgctttggcgtggtggagtttgacgacaatttccgcgctatcagcctggaagaaaagccaaaacagccgaagagtaactgggcggtgaccgggctttatttctacgacagtaaagtcgtggagtacgcaaagcaggtgaagccgagcgagcgtggtgaactggagattacctccatcaaccagatgtacctcgaggcgggcaacctgaccgttgaactgctcgggcgcggatttgcctggctggataccggcactcacgacagcctgattgaagccagcacctttgtacagacggtggaaaaacgccagggctttaagattgcctgcctggaagagattgcctggcgtaacggctggctcgatgacgagggtgtgaagcgtgctgccagtagtttagcgaaaactggctacggccaatatctgctggagttacttcgtgcccgtccgcgccagtattgagccactaacctgggaaaacgccttctttggtgttaacagcgccatcgtgcgcattacgtctgaagcaccgctcctgacgccagacgcgttagcgccgtggtcacgggtgcaggccaaaattgcggcaagtaatacgggtgaactggatgccctgcaacagctgggattctccctggtagaaggtgaagttgatttggcgctacccgtgaacaatgccagtgatagcggtgctgtagtggcacaagagaccgatattcccgcattacgtcagttagccagcgccgcatttgcgcaaagccgttttcgtgcgccgtggtatgcgcctgacgccagcagtcgcttttatgcacagtggattgaaaatgccgtgcgcggcacctttgatcatcaatgtctgattttacgtgcggcgtccggcgatattcgcggctatgtctctttacgggaactcaatgcgacagatgcgcgaattggcctgctggctggacgcggtgcaggtgctgagctgatgcaaacggcgctaaactgggcgtatgctcgcggtaaaacaactttgcgggtggcgacccaaatgggcaacaccgccgcgcttaaacgatacatacaaagtggtgcgaatgtagaaagcaccgcgtactggttatacaggtgatcacatgattccatttaacgcaccgccggtggtgggaaccgaactcgactatatgcagagcgcaatgggtagcggcaaactgtgtggcgatggcggttttacccgtcgctgccagcagtggctggagcaacgttttggcagcgccaaagtgttactgacgccgtcctgcaccgctagcctggagatggcggcgctgctgctcgatatccagcctggcgatgaagtgatcatgccgagctacacctttgtctccaccgccaatgcctttgtgctgcgtggcgcaaaaatcgtttttgtggatgttcgcccggacaccatgaacatcgacgaaacgctgattgaagcggcgatcaccgacaaaacgcgcgttatcgtgccggtccattacgcgggtgtggcctgcgaaatggacaccattatggcgttggcgaaaaagcataatttgtttgtggtagaagatgccgctcagggcgtgatgtccacttacaaagggcgtgcactgggaaccattggtcatattggctgctttagcttccatgaaaccaaaaactacacggcgggcggtgaaggcggcgcgacgctgattaacgataaagcgttaatcgaacgagccgagatcatccgtgaaaagggcactaaccgcagccagttcttccgtggtcaggtcgataaatatacctggcgcgatattggctccagctatttgatgtccgatctgcaagctgcatacctgtgggcgcaactggaagcagcggatcgtatcaaccagcaacgtctggcgctgtggcaaaactactacgatgcgttagcgcctctggcgaaagccgggcgtatcgagctgccgagcattcccgatggctgcgtgcagaacgcgcatatgttctacattaaactgcgggatattgatgaccggagcgcgttgattaactttctgaaagaagcggaaatcatggcggtgtttcattacattccgctgcacggttgccctgcgggggaacactttggtgagttccacggtgaagatcgctacaccaccaaagagagcgagcgcctgctgcgcctgccgctgttctacaacctgagccccgtcaatcagcgtacggtaattgcgactttgttgaactacttttcctgatatgagcttggcaaaagcgtccttgtggacggcggccagtacactggtcaagattggtgccgggttactggtcggtaagttgctggcggtgagttttggtccggcggggcttgggctggcggcaaatttccgccagttgattaccgtgctcggcgtgcttgccggggctggcatctttaacggtgtaaccaaatacgttgcccagtaccatgataatccgcaacagctgcgccgcgtggtcggcactagtagtgcgatggtacttggtttctctacgctgatggcgctggtttttgtgctggcagctgcgccaatcagccagggattgtttggtaataccgactatcaggggctggtgcgtttagtggcgctggtgcaaatggggatcgcctggggcaacctgttactggcgctgatgaaaggctttcgcgatgccgcaggtaatgcgttaagcctgattgtcggcagcttgattggcgttctcgcgtactacgtcagttaccgtttgggcggttatgaaggggcgttgctgggtctggcgctgattcccgcgctggtggtaattcctgccgccatcatgttgatcaaacgtggtgtcatcccgttaagctatctgaaacccagctgggataacggtctggcagggcagttgagcaaatttacgctcatggcgttgattacgagcgtgaccttgcctgttgcttacatcatgatgcgtaaactgctggcggcgcagtatagctgggatgaggtggggatctggcaaggggtgagcagtatttccgatgcctacctgcaatttattacggcaagcttcagcgtatatttgctgcccacgttgagccggctaacggaaaagcgcgatatcacccgggaagtggttaaaagcctgaaattcgtcttaccggcagtggcggcggcgagttttaccgtctggctgctgcgtgattttgctatctggctgctgttgagcaataaatttaccgctatgcgcgatctctttgcctggcagttagtgggtgatgtgttaaaagtgggcgcttatgtctttggttatctggtgatcgccaaagcgagtctgcggttttatattctggcggaagtcagccagttcactttattgatggtatttgcccactggctaatccctgcgcatggtgcactgggcgcggcgcaggcatatatggcaacttatatcgtctatttttctctttgttgtggcgtgtttttactctggcgtaggcgggcatgactgtactgattcacgtactgggaagcgatatccctcaccataaccgaaccgttttgcggtttttcaatgacgcgctggccgcgacgagcgagcacgcgcgcgagtttatggttgttggcaaggacgacggcttaagtgatagctgtccggcgctttctgtgcaatttttccctgggaaaaaaagcctggcggaagcggtcatcgcgaaagcaaaagctaaccgtcagcagcgttttttcttccacggtcagttcaatcccacactgtggctggctctgctgagtggtggcattaagcccagccagtttttctggcatatctggggggcagacctgtatgagctttccagtggcttgagatataagcttttttacccactacgtcgcctggcgcaaaagcgagtcggctgtgtatttgccacccgcggcgatttgagcttttttgccaaaacgcacccaaaggtgcggggcgaactgctgttcttcccgacgcggatggaccctagcctcaatacgatggcgaacgatcggcaacgtgaagggaaaatgaccattctggtggggaactccggcgaccgcagcaatgagcatattgctgccttgcgcgccgttcatcagcaatttggcgatacggtaaaagtggtggtgccgatgggatatccgcctaataacgaagcgtacattgaggaagttcgtcaggcggggctggagttattcagcgaagaaaatctacaaattctgagcgaaaaactggaatttgacgtctatctggcgctacttcgtcagtgcgatcttggttactttatttttgcccgccagcagggcattggtacgctgtgcttactgattcaggcgggcattccttgtgtgcttaaccgggaaaatccgttctggcaggatatgacggaacaacatttgccggtgctgtttactaccgacgatctcaacgaggatattgtgcgtgaagcgcagcgccagttggcgagcgtggataaaaacaccattgccttctttagccctaactatctacaaggctggcagcgggcgttggcgattgccgccagggaggtcgcatgagtctgctgcaattcagtggcctgtttgttgtctggctgctctgcacgctgtttattgccacgctgacctggtttgagtttcgccgtgtgcgctttaacttcaatgtcttctttagtttgctgtttttgctcacctttttcttcggcttcccgctgaccagcgtgctggtatttcgctttgatgttggtgtcgcgccgccagaaatcttgttgcaggcgttgctttctgcgggctgcttctacgcggtttactatgtcacctacaaaacccgcctacgcaaacgcgttgctgatgtaccgcgccgtccgctgtttaccatgaaccgcgtggagaccaatcttacgtgggtgatcctgatgggtatcgcgctggtaagcgtcggcatcttcttcatgcacaacggctttttgctgttccggcttaactcctacagtcagatcttttccagtgaagtctccggcgtggcgttaaaacgcttcttttactttttcatcccggcgatgctggtggtctactttctgcgccaggacagcaaagcgtggctgtttttcctcgtcagcacggtcgcctttggcttgctgacttatatgattgtcggcggcactcgcgccaatatcatcatcgcattcgctatcttcctgtttattggcattattcgcggctggattagcttgtggatgctggcggcggcgggcgtgctggggattgttggcatgttctggctggcactaaaacgctatggaatgaatgtgagcggcgatgaagcgttctatacgtttctctatctcactcgcgacaccttcagcccgtgggagaatctggcgttgctgttgcagaactacgacaacatcgacttccagggcctggctccaattgtccgcgatttctatgtctttatcccttcctggctgtggccgggtcgcccgagtatggtgctgaacagtgccaactactttacctgggaagtgctgaataaccactccggactggcgatcagccctacgcttataggcagtctggtggtgatgggcggcgcgttgttcatcccgctcggggcgatcgtggttggtctgatcatcaaatggttcgactggctgtatgagctgggcaaccgcgagcctaatcgctataaagctgcgatattgcacagtttctgctttggggcgatcttcaatatgatcgtgctggcgcgtgaagggctggatagctttgtcagtcgcgtggtcttttttatcgtggtcttcggcgcatgtctgatgatcgcaaaactgttgtactggctttttgaaagcgccggactcattcataaacgtacaaaaagtagcctccggacgcaggttgaaggataacaatgaataacaacaccacggcaccaacctatacgctgcgtggcttacagttgattggttggcgtgatatgcagcacgccctcgattatctgtttgctgacgggcagcttaagcagggaacgctggttgccattaatgctgaaaaaatgctgactattgaagataacgccgaggtcagggagttaattaacgctgccgaatttaaatatgcggatggcatcagcgttgtacgtagtgtacgtaaaaagtacccgcaggcgcaggtttcccgcgttgccggtgccgatctctgggaagagctgatggcgcgcgcaggcaaagaagggacgccggtatttcttgtgggcggtaaacctgaagtgctggcgcaaactgaagctaaactgcgcaaccagtggaatgtgaatatcgttggcagtcaggatggttattttaaacccgagcagcgtcaggcgctgtttgaacgcattcatgccagcggtgcgcaaatcgtcaccgttgcgatgggaagcccaaagcaggagatcatcatgcgcgactgccgtctggtacatccagatgcgctgtatatgggcgttggcgggacttacgatgttttcaccggtcacgtaaaacgcgcaccgaaaatctggcaaacgctggggctggagtggctctaccgcctgcttagccagccgagccgcattaagcgtcagcttcgtttgctgcgttatttacgctggcactacaccggcaacctatgattttcctctctttgtaaagcgacggagtggtcactccgtcgcctgtctgcttttttattacacaaagcattcaaatttttaatgctttatttgccatttctcctgaattacgaaaacatttgcaacactcgatgtacccataacgataaccggtaacaccggaaagcatgcaaacacaacacgaggatttatggcagataacaaaccagagctacagcgtgggctggaagctcgacatatcgaactcatcgccctggggggcaccattggcgtcggcctgtttatgggggccgccagtaccctgaaatgggccgggccatccgtattgttggcctatatcatcgccgggctgttcgtctttttcatcatgcgtagtatgggcgaaatgttgttcctcgaaccggttaccggtagcttcgccgtttatgcgcatcgttatatgagcccgttctttggctatctcaccgcctggtcttactggtttatgtggatggcggtggggatctctgaaatcaccgccattggcgtttatgtccagttctggttcccggagatggcgcagtggatacccgcattgatcgcagtggcgctggtggcgttggcgaatctggcggcggtgcggttgtacggcgaaatcgagttctggttcgcgatgatcaaagtcaccacgattatcgtgatgattgtcattggcctgggcgtgattttctttggctttggcaatggcgggcagagcattggttttagcaatctcacagagcatggcggtttctttgcgggtggctggaaagggttcctgaccgctctgtgtattgtggtggcgtcctaccagggcgtggagctgattggcattactgccggtgaagcgaagaatccgcaggtgacgctgcgcagtgccgtaggcaaggtgctgtggcggatcctgattttctacgtaggcgcgattttcgttatcgtcaccatcttcccgtggaatgaaataggcagcaacggcagcccgttcgtactgacttttgccaaaatcggtattaccgcagcggcgggcattatcaactttgtggtgctgacggctgcgctctctggctgtaacagcggcatgtacagttgcggacgtatgctctacgcactggcgaaaaaccgtcagttaccggcggcaatggcgaaagtttcccgtcacggcgtaccggttgcgggtgtggcagtatctattgctattctgctaattggcagttgcctgaactacatcattcccaatccgcagcgtgtgtttgtctacgtctacagtgccagcgtgcttccggggatggtgccatggtttgtgatattgataagccagctgcgttttcggcgtgcacataaagcggcgattgccagccatccgttccgcagtatcctgttcccgtgggccaattacgtaacaatggcattcctgatttgcgttttgatcggcatgtactttaatgaagatacgcgtatgagcctgtttgttggcatcatctttatgctggcggtgacggcgatttataaagtttttggccttaatcgccacgggaaagcgcataaactggaggaataagcagcaaaacgcacaaaccgtaaccaaacgcgcaatttatttaaaaagggactagacagaggggtgggaagtccgtattatccacccccgcaacggcgctaagcgcccgtagctcagctggatagagcgctgccctccggaggcagaggtctcaggttcgaatcctgtcgggcgcgccatttagtcccggcgcttgagctgcggtggtagtaataccgcgtaacaagatttgtagtggtggctatagctcagttggtagagccctggattgtgattccagttgtcgtgggttcgaatcccattagccaccccattattagaagttgtgacaatgcgaaggtggcggaattggtagacgcgctagcttcaggtgttagtgtccttacggacgtgggggttcaagtccccccccctcgcaccacgactttaaagaattgaactaaaaattcaaaaagcagtatttcggcgagtagcgcagcttggtagcgcaactggtttgggaccagtgggtcggaggttcgaatcctctctcgccgaccaattttgaaccccgcttcggcggggttttttgttttctgtgcatttcgtcaccctcccttcgcaataaacgcccgtaataactcattgccccacggtatgatttcgcccttaacgtattgaaggatgacttcaggcaaggagcgaccatgctgcaacaggttccaacgcgtgcttttcatgtgatggcgaaaccgagcggttccgattgtaatctgaactgtgactactgtttttatctcgaaaaacaatccctttaccgcgaaaagccagtcacgcatatggacgatgacacgctggaagcgtatgtccgtcactatatcgctgccagcgaaccgcaaaacgaagtggcttttacctggcagggcggcgaaccaacgctactcgggctggcgttttaccgccgtgccgtagcgctacaggcgaaatatggtgctggcaggaagataagtaacagcttccagactaacggcgtgctgctggatgacgaatggtgcgcgtttctcgcggagcatcattttcttgttggtttaagcctggatggcccgcctgagatccacaatcaatatcgcgtgactaaaggtggcagacccacgcataagctggtgatgcgtgccctgacgctcctgcaaaaacatcatgtcgactataacgtgctggtctgcgttaatcgcaccagcgcgcagcaaccgttgcaggtatatgattttttgtgcgatgcgggagtcgaattcatccagtttattccggtggtcgagcgcctggctgatgaaacaactgcccgcgatggacttaagttacatgcgcctggtgatattcagggtgagctaacggaatggagcgtgcgccccgaggagttcggtgagtttctggtggcgatattcgaccactggatcaaacgcgacgtcggcaagattttcgtgatgaatatcgaatgggcgtttgccaattttgtcggtgcgccgggtgcggtttgccatcatcagccaacctgtgggcgcagcgtgattgttgagcacaacggcgacgtttacgcctgtgatcactatgtttatccgcaatatcggctggggaatatgcaccagcaaacaattgcagaaatgatcgattccccgcaacagcaggcgtttggtgaagataaatttaagcagttaccggcgcagtgtcgcagttgtaacgtgttaaaagcgtgctggggaggctgcccgaaacaccgcttcatgctcgatgccagcggcaaaccgggactgaattatttgtgtgccgggtatcagcgttatttccgccatctaccgccatatcttaaagcaatggctgatttgctggcgcacggtcgcccggccagcgacattatgcatgcgcatttgctggtggtgagtaagtaaaaatcggcggccgcctgcggttgattgccggatgcggcgtaaacgccttatccggcctacatgatcgtgcaaattcaataaattgcagcgttctgtaggctggataagatgcgtcagcatcgcatccggcaaaggcagatctcagcgatagcgccggcttagtcagatttaatctgcgcgcgtggtggatattttttcaggatctccatatacgcgtgcatttcggtctgtagcggtacacccatcggaatatggcgcacgccgatggagtcgctttcctgcggatcggtgtagaggttaaacacgctgcttcccgccgtttgcattactgtgccggtgaatccaccctgatatccgctctgggtataagcgtaaggttgctgaatcaggacgtgatacttgaactcatccatacgcacagcagcgagtttaccgttgaggaagtagtgctcggccttacggttagactgaccatttgttcccaggaagaaggatgtctggtccacaccatcgataaaggtggttttcggcactaaattcgccactttcgctccaggatgccctgccagatccagcgcggtagggaagagatctgccagatcgacaataccgtcagatttacgcggttggatcatccctttccagtaaacgaaagtcggtacgcgaacgccgccttcccaggtgctacctttcgcaccacggaacggggtgcgtccgtgcggcggtacttcggcttccggtccgttatcggaggtaaagacgatcagcgtgttatcaagctgaccgtttttctccagtgttttatacagattagcgaacacatcgttcatctccaccatgcagtcgccatagctggtgcgtgccggagagctacccgcatatttcgcatttgggtagttatcgaagtggcagccacgagtgccgtagtagaggaagaatggtttatcgctcttcgccatcttgtcgaggaacttaacgccatagtccatccagcgttgatccagatcttccatatatttcggcgtaatgtcggcaatggcctgttgttcgccgccgcgcaccgcatgaacgtcatctttgctgaacggtaattgcttgatgtattcagaacggtccggactcagggccacttccggattgacgtgaacgtcgcgccattcggtgtacatatcagacacgctgttaaagccacggaaatcatcaaagccaacgttctgcggctggctctctttgttttcccccatatgccattttccgatggcctgagtgacgtagccctgatcgtgcagcaactgcggcagcgtggttaacccttgcagcccgcccggttgcccgtacattggcggcatcagaatgccgtggtggatggagtattgtccggtgagaatggtggcgcgggttggggaagagcttggttgagaatacgcgctagttaaaatcagcccctggctggcaacggcgtcgatatctggtgtagggttacccaccgccacgccgccaccgttaaaaccgacgtccatccagcccacatcgtccagcaagaaaacaaccacattcggtttcttaccggtttttttctcaagttctgccagcttctgctgggtttctttatcctgcgccggatgctgcattactggcatcatattgtcggcaatagtggtcgccggtttaaccagatactggtttgggtgatcgtatccggcaaagcctttgcgtgcggtggcagtactcggggtatctgctgcgctggccatgagaggaagagcggcggcgacagcaacaacaagacgtttgggactaaagctaaattccatgcaaaatgctccggtttcatgtcatcaaaatgatgacgtaattaagcattgataattgagatccctctccctgacaggatgattacataaataatagtgacaaaaataaattatttatttatccagaaaatgaattggaaaatcaggagagcgttttcaatcctacctctggcgcagttgatatgtaaggcaggtttattatatcgcgttgattattgatgctgtttttagttttaacggcaattaatatatgtgttattaattgaatgaattttatcattcataataagtatgtgtaggatcaagctcaggttaaatattcactcaggaagttattactcaggaagcaaagaggattacagaattatctcataacaagtgttaagggatgttatttcccgattctctgtggcataataaacgagtagatgctcattccatctcttatgttcgccttagtgcctcataaactccggaatgacgcagagccgtttacggtgcttatcgtccactgacagatgtcgcttatgcctcatcagacaccatggacacaacgttgagtgaagcacccacttgttgtcatacagacctgttttaacgcctgctccgtaataagagcaggcgtttttttatgtatcaggaaggccccggaggtgcttgcctccgggtgagaaggaattactgtggcgggttattctgcaacgttaacatcaaaccgtcgcgacgcatagctgcagcttcttccggcttgtgcagtctgtccagcgcgtcggcaagccatgcgtaatcgtaggcgtccggacgttgtttcagcgctgcgcggaaggcgaggcttgcttcctgccattctccgtgcttcatcagactctggcccagtgtgctccacaacagcgggcgatcgccgacgtttttgatttgctggcgcagcactttttccagctgttccggattgtttgttttcagtcgaggaatcggcagcagtaggcgatcgtcgtactggcgtttcaggccatcgatgataatttgctgggcagtatcatgatcgtcacattcaataagatgttccgccattgccacctgcaacgctacctgatgacgcgttttccggctttggtttttccaccagttacgcaaaccttcgctaccgttatcggcacgcgcctgatccatcaggccaatccatgcctgttgttccagcattgcacgatgttcttcatcaccaacatgggctttcgccatacttgggataatatccagcaggctactccatgcacctgtgcggatatacgcctgttccgccagacgtaatacttccggatggcgtggcgtaacttccagcagcttatccacgccgtggcgtgcagcatggttttcattacgggccagttgcagacgtacgcgggtgatttctaccggaatggtgtcgttgccggccagctccgctgcgcgttccagatgttggttggcgcgtgcttcatcaccacgttgttgcgcggcttcggcagccagtagatagttcaccaccggttgttccgcgtgatcggcatttttcgccatcagcttttcaacttgctgataatcgccttccgccagtttcagcagcgcctgttcggtctgcttacgtgcacggcgacgcttacgtccgacaaaccacccacgggtgtgcgcgccagtgcggaagatccgccgcagtagccactcaatggcaaacagcactaccatcgccagaatcaatatgatcgccaggcccgtgacgctggtttcgatattgtagttgtcggtctggatcagcacataaccctgatggccggcaatcatcgggccaaccacgatccccgcaatcagcaacacaaagagcaataacacttttagcatggttattctccttgcggcgcggctgccggagtatcagcttgcggtgcaggtgcaggtttagcttccgttgtccccgctgccggttgtgccagcaggttacgcacgcgagtctgcatcagtttttccagcatcgcctggctttgcagggtttccggaagatccatgctgatattttgctggcttaactggtccacctcgtcgaggaacgctttggtggtggcatcatcagtatcgtagtaagcacgtacccaggtggagacgttctccagcgcctggcgataagtctcttcctggtgacgcggtacagcttgtgctgcgaccagcaggcgagagcgaatattttcgcgcagatagatatcctgatttggcgctaacagcggtacggcggtgtcatcacgacggcgaatcgtaatgaagttgtccataaagttctgccagcttttttgcagattgatacgccattcgctgatggaactggaaagctcttcaccgtcactatccatcgggctaccatcgctgtcattatcggccagacgcaggttatctacctgattactaagctgattaagcttaaggatgatgccgtcataatccacctggcttactgcagaaaggctggcgatatcatcggtaattgcccgacgaacggtaatcagactcgggtcattcatatccgccaggctggcgtctgcacttttcagcaacgctgcagcggtcgtgacgtcctgatcgctccacagcttccgtccggcgagtttcaccagaaaatcggcctgagccagcagccaggttttagcatcgctgccggaaatggtggcgaccttttgttggacttcatccaactgttttgccagcgtttcttgctgacgattcgcctgcttaagttgtgcagcttgttgcttaataatgccttccagctcggctttttggctctcctgggctttttgcaatgccgtcagttggttagccagggcatcgctggtggcggtctgattgacggcctgttgtttaccccagccatacaaaccgatgcccgccgccagagcaatagcgatagccaccgcgctgagaatcaatgcggtattgttcttactctttttttctgttgcgacaggttgactcgtggtgtccacggcctccctggtctcttcaaccacggcggaggttttttcttgttccgtcattatggcttcctgttatgagagttattgtaatgcccgtaaaagcgcatcgttgtcagcgttatcggcgaccttaatgtcttgccagcccagttcccgggcgagtttcgccaaacgctcactgacgaccaatagtcgacagtgtagtaaccagtgctcacgataccattgtgggatcaggctccagagttgctgcaacatttcaccgctggtaacaacgaccatcgtcacctcgcgggcttgccagcgcatcgcttcttctgcaccatcgtaatggattgcgcatcgttgataacattcacaaaaagtgacctcagcaccgcgcgccgtcagggtatccccaattagctcacgaccaccattgccacgtaatatcagcgcacgtttgcccgcaatattttgtaattcaggtaattgtagcaagacttcgctgatttcccgatcctgcgggtagagaatcttctgtccacttacggtatgtagtgccagtgcggtggtgcgtccaatggcgaaataatcaggtagtcggggccatttacgatcttgctgatgcagctgactttgggcaaaagcaaccgcgtgttggctgagggcaaacaacagatcgctctcccccagcgctgccagttgatcagcaagttgcggtaattgttgacccggagaaaactcaatcagcggaaaatgccaggccacctgccccagtgtgcgcagacggctcactaactcttctccagcgggagacgggcgggtgacaaggatactcatgccggggcgtctccgttatagacttcagcgaggatctcgcgcgcgccgttattcagtagctcttctgccaggctaatccccatttgttcggcatcttgcggcgcaccgcggcgttcaccgcgaataatctggctaccgtccggcgcgccgaccagcgcacgcagccagatttcgccatcaataagctcggcgtagctaccaattggcacctgacatccgccttcgagacgggtattcatggcgcgttctgcggtaacgcgcagtgcagtttcgtggtgattcagcgcggcaagcagctcgcgagtgcgactatcatcaaggcggcattcaatacccaccgcaccttgtcctaccgccggaagagaaatctcgggtggcaacgcggcgcgaatacgactctccagacctaaacgttttagtccggctacggcaagaatgatggcatcgtattcgccgttatccagtttgctcaggcgagtgccgacgttgccgcgcagggagcggataatcagatccggacggcgttcagccagttggcactggcgacgtaaactggacgtcccgacgatactgcctgccggtaacgcatccagactgtcatagttattggacacaaaggcatcgcgaggatcttcacgctcacaaatagtgaccagtcccagaccttgcgggaattcaaccggcacatctttcatactgtgtacggcgatatcggcgcgattttcgaggagcgcgacttccagctcttttacaaataagccttttccgcctactttcgccagcggcgtatcaagaatcacatcgccgcgcgtcaccatcggtaccagttcaacgaccaggcccggatggctcgccatcaacttgtctttgacatagtgtgcctgccagagtgcaagtgggctttggcgtgtggcaattcttaaaacattgtctaacatgcttgttaccgtcattatcatccgtggtccatcctaacatccttgccagagtgatgtcagtgttgtggtgaaacgtagacgcctgcgcaaaccgtaaaatgaggtctggcagtggatcctgacaggcgtttcacgccgttgtaataaggaatttacagagaataaacggtgctacacttgtatgtagcgcatctttctttacggtcaatcagcaaggtgttaaattgatcacgttttagaccattttttcgtcgtgaaactaaaaaaaccaggcgcgaaaagtggtaacggttacctttgacatacgaaatatcccgaatgccgcgtgttaccgttgatgttggcggaatcacagtcatgacgggtagcaaatcaggcgatacgtcttgtacctctatattgagactctgaaacagagactggatgccataaatcaattgcgtgtggatcgcgcgcttgctgctatggggcctgcattccaacaggtctacagtctactgccgacattgttgcactatcaccatccgctaatgccgggttaccttgatggtaacgttcccaaaggcatttgcctttacacgcctgatgaaactcaacgccactacctgaacgagcttgaactgtatcgtggaatgagtgtacaggatccgccgaaaggtgagcttccaattactggtgtatacaccatgggcagcaccagctccgtagggcaaagttgttcctctgacctggatatctgggtctgtcatcaatcctggctcgatagcgaagagcgccaattgctacaacgtaaatgtagcctgctggaaaactgggccgccagcctgggtgtggaagtcagcttcttcctgattgatgaaaaccgcttccgtcataatgaaagcggcagcctggggggcgaagattgtggctccacccagcatatactgctgcttgacgaattttatcgtaccgccgtgcgtctcgccggtaagcgtattctgtggaatatggtgccgtgcgacgaagaagagcattacgacgactatgtgatgacgctttacgcgcagggcgtgctgacgccaaatgaatggctggatctcggtggcttaagcagcctttctgctgaagagtactttggtgccagcctttggcagctctacaagagtatcgattccccatacaaagcggtactgaaaacactgctgctggaagcctattcctgggaatacccgaacccacgtctgctggcgaaagatatcaaacagcgtttgcacgacggcgagattgtaagctttggtctcgatccatactgcatgatgctggagcgtgttactgaatacctgacggcgattgaagattttacccgtctggatttagtacgtcgctgcttctatttaaaagtgtgcgaaaagctcagccgtgaacgcgcctgcgtaggctggcgtcgcgcagtgttgagccagttagtgagcgagtggggttgggacgaagctcgtctggcaatgctcgataaccgcgctaactggaagattgatcaggtgcgtgaggcgcacaacgagttgctcgacgcgatgatgcagagctaccgtaatctgatccgctttgcgcgtcgcaataaccttagcgtctccgccagtccgcaggatatcggcgtgctgacgcgtaagctgtatgccgcgtttgaagcattaccaggtaaagtgacgctggtaaacccgcagattagtcccgatctcagcgaaccgaatctgacctttatttatgtgccgccgggccgggctaaccgtagtggttggtatctgtataaccgcgcgccaaatattgagagcatcatcagccatcagccgctggaatataaccgttacctgaataaactggtggcgtgggcatggtttaacggcctgctgaccagccgcacccgtttgtatattaaaggtaacggcattgtcgatttgcctaagttgcaggagatggtcgccgacgtgagccaccatttcccgctgcgcttacctgcaccgacaccgaaggcgctctacagcccgtgtgagatccgccatctggcgattatcgttaacctggaatatgacccgacagcggcgttccgcaatcaggtggtgcatttcgatttccgtaagctggatgtcttcagctttggcgagaatcaaaattgcctggtaggtagcgttgacctgctgtaccgcaacagctggaacgaagtgcgtacgctgcacttcaacggcgagcaaagcatgatcgaagccctgaaaactattctcggcaaaatgcatcaggacgccgcaccgccagatagcgtggaagtcttctgttatagccagcatctgcgcggcttaattcgtactcgcgtgcagcaactggtttctgagtgtattgaattgcgtctttccagcacccgccaggaaaccgggcgtttcaaggcgctgcgcgtttctggtcaaacctgggggttgttcttcgaacgcctgaatgtaagcgtacagaaactggaaaacgccatcgagttttatggcgcgattagccataacaaactgcacggcctgagtgtgcaggttgaaaccaatcacgtcaaattaccggcggtggtggacggctttgccagcgaagggatcatccagttctttttcgaagaaacgcaagacgagaatggctttaatatctacattctcgacgaaagcaaccgggttgaggtatatcaccactgcgaaggcagcaaagaggagctggtacgtgacgtcagtcgcttctacagcagtagccatgaccgttttacctacggcagtagcttcatcaacttcaacctgccgcagttctatcagattgtgaaggttgatggtcgtgaacaggtgattccgttccgcacaaaatctatcggtaacatgccgcctgccaatcaggatcacgatacgccgctattacagcaatattttagctgatgaacgtgccggaaagcgaggcttatccggcatgcaatcttagcggaaactgactgtttcacccgcctgctgcgtcgccgcctgttccagcaaatcccagaaggtttcgccgctgcgatcacaaatccactcatcgcctttcaggtcaaaatggtagccgccctgtttggttgccagccatacctggtgcagcggctcctggcggttgataatgattttgctgccattctcaaaggtaatggtcagtacgccgccgttgatttcgcagtcgatatcgctgtcgccatcccagtcgtccaggcgttcttcaatggtcagccagagttgatcagccaggcgatgaaattcactgtcgttcattgttgtatcctgtttttaagtgatggcggcagtatagcggcatggggtcagggcttcaaagtttgcacctctgcggctgcgttccggcacgatagttccgtcaccggaataatgatgtctctgtgtagcgaaagatttgtctctagtttagggcgcagttacaccacgtctttccctgtttctggtaaacattatgatcaggtttaccgagcgagcatcctcacgctgacggaactaaaaaagacaacaaacaaaccacattgcgatagtgcataaagccatcctggcgcgaggtgccgatcacgaaactaccagcaaaacataaatccccacgagtaagcgttatactcgcagcatttcctcacttttcagacttcataaagagtcgctaaacgcttgcttttacgtcttctcctgcgatgatagaaagcagaaagcgatgaactttacaggcaatccataatgaaaaacgtgtttaaggcactcactgtattacttactctcttcagcctgacgggctgcggtctgaaaggtccgctctatttcccgcctgcagataaaaacgcaccgccgccgaccaaaccggtagagacgcaaacgcaatccacggtgccggataaaaacgatcgcgccactggcgatggtccatcccaggtgaattactaaaagtcagtttctgtacccgcgtgattggagtaaatgatgcagttcagcaaaatgcatggccttggcaacgattttatggtcgtcgacgcggtaacgcagaatgtcttttttagtccggagctgattcgtcgcctggctgatcggcacctgggggtagggtttgaccaactgctggtggttgagccgccgtatgatcctgaactggattttcactatcgcattttcaatgctgatggcagtgaagtggcgcagtgcggcaacggtgcgcgctgctttgcccgttttgtgcgtctgaaaggactgaccaataagcgtgatatccgcgtcagcaccgccaacgggcggatggttctgaccgtcaccgatgatgatctggtccgcgtaaatatgggcgaacccaacttcgaaccttccgccgtgccgtttcgcgctaacaaagcggaaaagacctatattatgcgcgccgccgagcagacaatcttatgcggcgtggtgagcatgggaaatccgcattgcgtgattcaggtcgatgatgtcgataccgcggcggtagaaacgcttggtcctgttctggaaagccacgagcgttttccggagcgcgccaatatcggttttatgcaagtggttaagcgcgagcatattcgtttacgcgtttatgagcgtggggcaggagaaacccaggcctgcggcagcggcgcgtgtgcggcggttgcagtagggattcagcaaggtttgctggccgaagaagtacgcgtggaactccccggcggtcgtcttgatatcgcctggaaaggtccgggtcacccgttatatatgactggcccggcggtacatgtctacgacggatttattcatctatgaagcaaccaggggaagaactgcaggaaacactcacggagcttgatgaccgggcggttgtcgattatctgattaaaaatcctgagttttttatccgtaatgcgcgcgcagtagaagcgatacgtgtgccgcatccggtacgcggcaccgttagcttggtcgagtggcacatggcccgcgcacgtaatcatattcatgttctggaagagaacatggcgctgttgatggaacaggctatcgccaacgaaggcctgttttatcgcctactctacctgcagcgcagtctcaccgccgccagcagtctcgacgatatgctgatgcgctttcaccgctgggcgcgcgatctcggcctggcaggtgcgagtctgcgcctgtttccggatcgctggcgcttaggtgcgccgagcaaccacactcatctggcattaagccgtcagtctttcgaaccgctgcgtattcagcgtttggggcaggaacagcactatcttgggccgcttaacggaccagagctgctggtggtgctaccggaagcgaaagcggtgggaagcgtggcgatgagcatgctgggaagcgatgctgatttgggtgtcgtgctgtttaccagtcgcgatgccagtcactatcaacaagggcaaggaacgcagttacttcatgaaattgcgctgatgttgccggagcttctggagcgttggattgaacgcgtatgaccgatttacacaccgatgtagaacgctacctacgttatctgagcgtggagcgccagcttagcccgataaccctgcttaactaccagcgtcagcttgaggcgatcatcaattttgccagcgaaaacggcctgcaaagctggcagcaatgtgatgtgacgatggtgcgcaattttgctgtacgcagtcgccgtaaagggctgggagcagcaagtctggcgttacggctttctgcgctacgtagcttttttgactggctggtcagccagaacgaactcaaagctaacccggcgaaaggtgttagcgcaccgaaagcgccgcgtcatctgccgaaaaacatcgacgtcgacgatatgaatcggctgctggatattgatatcaatgatcccctcgctgtacgcgaccgtgcaatgctggaagtgatgtacggcgcgggtctgcgtctttctgagctggtggggctggatattaaacacctcgacctggagtctggtgaagtgtgggttatggggaaaggcagcaaagagcgccgcctgccgattggtcgcaacgctgtggcgtggattgagcactggcttgatttgcgcgacctgtttggtagcgaagacgacgcgctttttctgagcaaactgggcaagcgtatctccgcgcgtaatgtgcagaaacgctttgccgaatggggcataaaacaagggctgaataatcacgttcatccgcataaattacgtcacagcttcgccacgcatatgctggagagcagcggcgatcttcgtggtgtgcaggagctgctgggtcatgccaacctctccaccacgcaaatctatactcatcttgattttcaacaccttgccagcgtgtacgatgcggcgcatccacgcgccaaacgggggaaataatgcgtttttaccggcctttggggcgcatcagcgcgctcacctttgacctggatgataccctttacgataaccgtccggtgattttgcgcaccgagcgagaggcgcttacctttgtgcaaaattatcatccggcgctgcgcagcttccagaatgaagatctgcaacgcctgcgccaggcggtacgggaagcggaacccgagatttatcacgacgtgacgcgctggcgttttcgtagcattgaacaagcgatgctcgacgccgggctgagtgccgaagaagccagtgcaggcgcacacgcagcaatgatcaactttgccaaatggcgcagccgaatcgacgtcccgcagcaaactcacgacaccttaaaacagctggcgaagaaatggccgctggtggcgatcaccaacggtaacgcccagccggagctgtttggtttgggggattattttgagtttgtgctgcgcgctggcccgcacgggcgcagtaaaccgttcagcgatatgtactttttggctgcggaaaaactcaacgtgccgatcggcgagatcttacatgttggggacgatctcaccactgacgtgggtggggcaattcgcagcggaatgcaggcttgttggatcagaccggaaaatggcgatctgatgcaaacctgggacagccgtttactgccgcatctggaaatttcccggttggcatctctgaccagcctgatataatcagcaaatctgtatatatacccagctttttggcggagggcgttgcgcttctccgcccaacctatttttacgcggcggtgccaatggacgtttcttacctgctcgacagccttaatgacaaacagcgcgaagcggtggccgcgccacgcagcaaccttctggtgctggcgggcgcgggcagtggtaagacgcgcgtactggtgcatcgtatcgcctggttgatgagcgtggaaaactgcagcccatacagcattatggcggtgacgtttaccaacaaagcggcggcggagatgcgtcatcgtatcgggcaactgatgggcacgagccagggcggtatgtgggtcggcaccttccacgggctggcgcaccgtttgctgcgtgcgcaccatatggacgccaatctgccgcaggatttccagatcctcgacagtgaagaccagctacgcctgcttaagcgtctgatcaaagccatgaacctcgacgagaagcagtggccgccgcggcaggcaatgtggtacatcaacagccagaaagatgaaggcctgcgtccgcatcatattcaaagctacggtaatccggtggagcagacctggcagaaggtgtatcaggcgtatcaggaagcgtgtgaccgcgcgggcctggtggacttcgccgagctgctgctgcgcgctcacgagttgtggcttaacaagccgcatatcctgcaacactaccgcgaacgttttaccaatatcctggtggacgaattccaggataccaacaacattcagtacgcgtggatccgcctgctggcgggcgacaccggcaaagtgatgatcgtcggtgatgacgaccagagtatctacggctggcgcggggcgcaggtggagaatattcagcgtttccttaatgatttccccggtgccgaaactattcgtctggagcaaaactaccgctctaccagcaatattctgagcgccgctaacgccctgattgaaaacaataacgggcgtctgggtaaaaaactgtggaccgatggcgcggacggtgagcctatttccctctattgcgcttttaacgaactcgatgaagcgcgttttgtggttaaccgcatcaaaacctggcaggacaacggcggagcgcttgccgagtgcgccattctctaccgcagcaacgcccagagccgggtgctcgaagaggcgttattgcaggccagtatgccgtaccgtatttacggcgggatgcgcttcttcgaacgccaggaaatcaaagatgcgctcagctatctgcgcctgattgccaaccgcaacgacgacgcggcctttgagcgtgtggtgaatacgccaacgcggggtattggtgaccggacgctggacgtggtacgtcagacaagccgcgatcgccagttaacactctggcaggcatgtcgtgagctgttgcaggaaaaagccctcgccgggcgagctgccagcgccttgcagcgatttatggaattaatcgacgccttagcgcaggaaactgccgatatgccgctgcatgtacagactgaccgggtaattaaagactccggcctgcgtaccatgtatgagcaggagaagggcgaaaaaggtcagacgcgtatcgaaaacttagaggaactggtgacggcaacgcgccagttcagctacaacgaagaagacgaagatttaatgccgctgcaggcgttcctctcccatgcggcactggaagcaggtgaagggcaggcggatacctggcaggatgcggtgcagttgatgacgctacacagcgcgaaaggcctggagttcccgcaggtgtttatcgttggtatggaagagggcatgttcccaagccagatgagcctggatgaaggcgggcgtctggaagaagaacgccgtctggcctacgttggcgtaacccgcgcgatgcagaaactgacgctgacctacgcggaaacccgccgtctgtatggtaaagaggtttaccatcgcccgagccgctttatcggcgagctgccggaagagtgtgtggaagaggtgcgcctgcgcgccacggtaagccgcccggtcagccatcagcggatgggtacgccgatggtcgagaacgacagcggctacaagctcggccagcgcgtacgccacgctaagtttggtgaaggcaccattgtcaatatggaaggcagcggtgagcatagccgtttgcaggtggcatttcagggccagggtattaaatggctggtggcggcatacgcccggctggagagcgtgtaacgttgccggatgcggtgctgcgcaccttatttggcctaaaaaatcattcagattcaataaattgcaacgtcatgtaggccggatagggcgtttacgccgcatccggcatctgcgccatcttcagtatctgacacaaaactatcgttttaacctttccgctcgacggaaatcatggtgacaaaaggatagcgttgccacgggattgccccgcctttcatatacatatgactaatcgtgccatcaagataaagcagctgctcaacgttcagtttcgctttggcataacaggcaaaatcataaaaatttgttgcctgctggctcaacaaaaacacggcgttcccatgtttattaatcccaacaccgttacgaattttgctactggcgacgttgggatgaatacgcggattaattacaccgttttccatcaacattggcccactctgcaccgcaaactgaatctctttactggttttgaaggcatccagacgaacgatgccgactttatctcccgcgacataaaacacgccgccaggacggataaagaaattcccttcaccactagcgagatttaacgccaccttctgctgaccgttttcgatgtacaaaccgagcggcgcatagctttcatcatagatgccgccgttcatcgccatctgcacctgaccctgactattaatatccgccagcagagcatgtaacgttccccacgcttcgccattggctttttgccagtacattttcacccgctctgtttgaggattaacggtatacgcctgtacggtcagcgtcggatcactgagtgcgcaatcatcagcggcaacagcaaacaagggaagtaaggtgagggcgagaaaaatccgtttgagattcaaggtgatcattcctttaccaatgagtagctgatgcgccattataggtcctggatgtgggatttttttatcctgttagcgaccttgacgagtaccaaaaagcgcgaagttcaactattgttctgtggtgttctgttgcgtgttgacggcaaaattttgctggcgtaacatgcgcgcacgatcactctaagaggacattcgccttggacacacccagtagatactggctcactatcctgtcatccaggatcaactcctaaggctatccctttttgctgatagccttagcggttgtcagcgacctcaatttttcccgtcgcgctgagtcaggctgtttaatggtctgaaacccaatttgtttctgtgtgcccaccgaactgtccgatattttaagcattgggagtcccggtcatgctgagcgcatttcaactggaaaataaccgactgacccggctggaagtcgaagagagtcaaccccttgtaaatgcagtatggattgatcttgtcgaaccggacgacgacgagcgactgcgcgtacaatctgaacttggccagagcctggcaacccgcccggaactggaagacatcgaagcaagcgcacgtttctttgaagacgacgacggcctgcatattcactccttcttcttctttgaagatgcggaagatcacgccggtaactccactgtggcatttaccatccgtgatggtcgtctgtttactctgcgtgagcgtgaactgcccgcttttcgtctgtatcgtatgcgtgcccgtagccagagcatggtagacggtaacgcctacgagttgctgctggatctgttcgaaaccaaaatcgaacagttggcagatgaaattgaaaatatctatagcgacctggagcagttgagccgggtgattatggaagggcatcagggcgatgagtacgacgaggcgctctccactctggcggaactggaagatatcggctggaaagttcgcctgtgtctgatggatacccagcgcgcgctcaacttcctggtgcgtaaagcgcgtttaccgggtgggcaactggagcaggcgcgtgaaatcctgcgagatatcgaatccctgctgccgcataacgaatccctgttccagaaggtgaacttcctgatgcaggcggcaatgggttttatcaacatcgagcagaaccgcatcatcaaaatcttcagcgtggtatccgtggtattcctgccgccgacgctcgttgcttccagctatggcatgaactttgagtttatgccagaactgaagtggagcttcggctaccctggcgcgattatctttatgatcctcgcgggcctggcaccgtatctgtactttaagcggaagaactggttgtaaaaaacgagagcggtggcttagtctggctaagccacctgttattcaaaggctccaggtatttaacccttttacctctttctcatagaaccatttgttcgtgttaacagcaacataggctgctacggcaattcccagaatgttaacgccaattagtgcaccaacaaatagagatagaataccaagtaatagaactataattgcttttttccataaccccaggacaaataaatatatccaggaacagaagaaagcaatgaaattcatttgaatagttaagcgttgtcttacttttaatgctttaaatgctgctttatattctggtgttgccccccagaatccaggaaaaccatgttgatcataaaaattaaatcggtatttccatttttcacttaaactaccatcgttcatatattccttactcataaatactccataattattgtttactactatcagtaggtgcaagcattagcatactgaaagtggaaaaataacaaatcaaaaaaatcatgctaccattgccactacaggcaaaatcttcggctatcattgtgatgatagagatgatatatactgctaatgtaccaaaaacataagtttttatatagatgaaaccactatcacggagtcgctggcaattcatgttgatgacgagataatggagtacgatggtagagactataacaagaaagcctgcttctccatcgttaaaaaagataataagaaaggcaaaaatgaaatttattaaaataaaactaaatatataacgacgtctggaaatcttaccgttagatgttgggataaatatacgtaacataaattttacatccttgtatgagtctccggtcagcatggcaatatgcccactctcatgcaagagtcggcatattttttcagaatatatttattttttatttggacgttctacgctgcgtataaatcgcatccatcacaaaaattgccagcgccacccaaataaaggcgaaagtcaccatcttatcggcacccggtttttcaccataaaacgtcacagccagcaggaacatcagcgtcgggccaatgtactggaaaaagcctaacgtactgagacgcaagcgcgtggcagcggcggtaaaacacaacagcggtacggtagtgacaataccggcggcgatcagcagtaaattcaggctcatcgggttttgccccatatggctggtactgctgtcggcaatagcaaacaggtaaattgccgccacgggcagcagccacatggtttcgattaacatgccggtttgcgcttcaacggcaatcttcttgcgtaccagaccgtagaaggcaaaactaaatgccagtcccagcgcgataataggtaggctaccaaaagtccacagctggactaacacgccacatatcgccagaatcaccgccagccattgcatccggcggaatcgctcgccgaggaaaatcatccccagcacaatgttcaccagcgggttaataaagtaaccaaggctcgcttccagcatatggtgattgttcaccgcccagataaacagtagccagttgccaccaatcagcacggcagagactgccagcataaaaattttctgtggcgtctgaatcagcgtttttaaataggaccactggcggcaaatgctcatcagcaccaccataaagaaaaagctccagatcacgcgatgcgtcaggatttcatcggcgggcacgtagtaaatcaacttgaagtacgctggcgctataccccaaataaaataagcggcaagagcgagtaatacgccctgccgcgtttgttttgcatccatcgggaatactcatttttaattggtaacagcagtttacctgcttttatgtcttcaacctaccatataggtggcggtggcactggcaatataaagctgttcttcattgtgtaattcaacgcgggcgacggcgactttattgcctgcacgcaacaggctactagtagcagtaaaacgctcgcccctgcctgggcgcagataatcaacgcgaagatcaatggtccccatccggcttagccgctggcgtagttcatcttcactgatggtttcgtggcgggttaaggtacttcccacgcacaccagaccggcggcgacatccagcgcgctcgcaatgaccccgccgtgcaaaatgctttgcgcccagttgcccaccatcattggctgatttttaaaggccagctgtgcgaactctttttcgtaacgctccagttccatccccaatgcgcggttaaatggcatgtgataaacaaacatctcacccactaatttcagggcttgttcagcggtcagtacggcagacatatcatccttacacttcattggttaatgaaatgttgattttatgcttctttgttgttggtttctactttaggaagggataactaacggctatggagttaagtatgtaaaatagcccgcagaaaaatattcaccttatcaataattcgttacggagaacacgaccgatgcggactctgcagggctggttgttgccggtgtttatgttgcctatggcagtatatgcacaagaggcaacggtgaaagaggtgcatgacgcgccagcggtgcgtggcagtattatcgccaatatgctgcaggagcatgacaatccgttcacgctctatccttatgacaccaactacctcatttacacccaaaccagcgatctgaataaagaagcgattgccagttacgactgggcggaaaatgcgcgtaaggatgaagtaaagtttcagttgagcctggcatttccgctgtggcgtgggattttaggcccgaacagcgtgttgggtgcgtcttatacgcaaaaatcctggtggcaactgtccaatagcgaagagtctagtccgtttcgtgaaaccaactacgaaccgcaattgttcctcggttttgccaccgattaccgttttgcaggttggacgctgcgcgatgtggagatggggtataaccacgactctaacgggcgttccgacccgacctcccgcagctggaaccgcctttatactcgcctgatggcagaaaacggtaactggctggtagaagtgaagccgtggtatgtggtgggtaatactgacgataacccggatatcaccaaatatatgggttactaccagcttaaaatcggctatcacctcggtgatgcggtgctcagtgcgaaaggacagtacaactggaacaccggctacggcggcgcggagttaggcttaagttacccgatcaccaaacatgtgcgcctttatactcaggtttacagcggctatggcgaaagcctcatcgactataacttcaaccagacccgtgtcggtgtgggggttatgctaaacgatttgttttgatgaacggttgagtggttggcaaatctggaatccagcatccaggattaccctctcagagactaaaagcattgcagtttctcgcgcaggcgctgaaaatagcgcctgtttttatttcaggcaatcggggtgaatgtggcgcaggcggaagtgttgaatctggagtccggagctaaacaggttttacaagaaacctttggctaccaacagtttcgccccggccaggaagaaattatcgacactgtgctttccggccgcgattgcctcgtcgtcatgcccactggtggcggaaaatccctttgctatcaaatccctgccttattgctaaacggccttaccgtggttgttagtccgctgattagcttgatgaaagatcaggtggatcaactgcaagccaacggcgtggcggcggcgtgccttaacagcacgcaaacccgcgaacagcaacttgaagtgatgacaggctgccgcaccgggcaaattcgtctgctttatatcgccccggaacgcctgatgctggataactttcttgagcatctggcgcactggaatccggtgttattagccgttgatgaagcgcactgtatctcccaatggggccacgatttccgcccggaatatgccgcgctcggtcagttgcgccagcggttcccgacgctgccgtttatggcgctgaccgccacagccgacgacaccacgcgccaggatatcgtgcgcctgctggggctgaacgatccgctgattcaaatcagcagttttgaccgtccgaatattcgctacatgctgatggagaagttcaaaccgctcgatcagttgatgcgctacgtgcaggaacagcgcggtaagagtggcattatctactgcaacagccgcgcgaaagtagaagacaccgctgcgcgcctgcaaagcaagggaattagcgcggcggcctatcatgccgggctggaaaataatgttcgcgccgatgtgcaggaaaaattccagcgcgatgacctgcaaattgtggtggcgacggtggcgttcggcatgggcatcaataaaccaaacgttcgcttcgtggtccactttgatattccgcgcaatatcgaatcctattatcaggaaaccggacgcgccgggcgtgatggcctgcccgcggaagcgatgctgttttacgatccggctgatatggcgtggctgcgccgttgtctggaagagaagccgcaggggcagttgcaggatatcgagcgccacaaactcaatgcgatgggcgcgtttgccgaagcgcaaacttgccgtcgtctggtattgctgaactattttggcgaagggcgtcaggagccgtgcgggaactgcgatatctgcctcgatccgccgaaacagtacgacggtagtaccgatgctcagattgccctttccaccattggtcgtgtgaatcagcggtttgggatgggttatgtggtggaagtgattcgtggtgctaataaccagcgtatccgcgactatggtcatgacaaactgaaagtctatggcatgggccgtgataaaagccatgaacattgggtgagcgtgatccgccagctgattcacctcggcctggtgacgcaaaatattgcccagcattctgccctacaactgacagaggccgcgcgcccggtgctgcgcggcgaatcctctttgcaacttgccgtgccgcgtatcgtggcgctcaaaccgaaagcgatgcagaaaagcttcggcggcaactatgatcgcaaactgttcgccaaattacgcaaactgcgtaaaagcatagccgatgaaagtaatgtcccgccgtacgtggtgtttaacgacgcaaccttgattgagatggctgaacagatgccgatcaccgccagcgaaatgctcagcgttaacggcgttgggatgcgcaagctggaacgctttggcaaaccgtttatggcgctgattcgtgcgcatgttgatggcgatgacgaagagtaatcagcagcataaaaaagtgccagtatgaagactccgtaaacgtttcccccgcgagtcaaatgtatgttgatgttatttctcaccgtcgccatggtgcacattgtggcgcttatgagccccggtcccgatttcttttttgtctctcagaccgctgtcagtcgttcccgtaaagaagcgatgatgggcgtgctgggcattacctgcggcgtaatggtttgggctgggattgcgctgcttggcctgcatttgattatcgaaaaaatggcctggctgcatacgctgattatggtgggcggtggcctgtatctctgctggatgggttaccagatgctacgtggtgcactgaaaaaagaggcggtttctgcacctgcgccacaggtcgagctggcgaaaagtgggcgcagtttcctgaaaggtttactgaccaatctcgctaatccgaaagcgattatctactttggcagcgtgttcagtttgtttgtcggtgataacgttggcactaccgcgcgctggggcatttttgcgctgatcattgtcgaaacgctggcgtggtttaccgtcgttgccagcctgtttgccctgccgcaaatgcgccgtggttatcaacgtctggcgaagtggattgatggttttgccggggcgttatttgccggatttggcattcatttgattattagccggtgatgccagacgcgtcttcagagtaagtcggataaggcgtttacgccgcatccgacattatttttcacgcatgcctcgcgcttgctaacagcgctcccaccagcataaacaagctgccgaaaatcttattcagcgccttcatctgctttggtcctttaatccatagagcaatccgttgagcaagggtggcgtaaccgatcatcacaataatatcgaccacaatagtggtgacgccgagcacgatatactgcatcagttgcggctgttgcggcatgatgaattgcggaaatagcgccgccagaaacacaatacttttgggattggtgagattcacaaaaactgcgcgctggaacaaatgtcgacggctttgagtagaggccaggcttttaaggtcaattgcaccagcggcgcgccactgctggattcccagccaaatcaagtaagccgcgcctgcccacttcaacacttcaaacgcaatcacactgcgggaaaatagcgtccccaaccccacgccaaccagcacaatatgaatcgccagtccggtctgaagcccagcaatagacgccaccgcgccgcgataaccgtggttgaggctggtggtcatagtgttgattgcaccagagcctgggctcaggcttaaaatgatgcttgtcagcaggtaggcaaaccaccattctaaggtcatgatgaactcccggtgtgtctatttttgtgccacaatacgctactgtcgcagcgttgtgtcaggcacgctaaaaaaaacgattttacgtggtttaagaggcagattacccgatgtttcagcagcaaaaagactgggaaacaagagaaaacgcgtttgctgcttttaccatgggaccgctgactgatttctggcgtcagcgtgatgaagcagagtttactggtgtggatgacattccggtgcgctttgtccgttttcgcgcacagcaccatgaccgggtggtagtcatctgcccggggcgtattgagagctacgtaaaatatgcggaactggcctatgacctgttccatttggggtttgatgtcttaatcatcgaccatcgcgggcagggacgttccggtcgcctgttagccgatccgcatctcgggcatgttaatcgctttaatgattatgttgatgatctggcggcattctggcagcaggaggttcagcccggtccgtggcgtaaacgctatatactggcacatagcatgggcggtgcgatctccacattatttctgcaacgccatccaggtgtatgtgacgccattgcgctaactgcgccaatgtttgggatcgtgattcgtatgccgagttttatggcacggcagatcctcaactgggccgaagcgcatccacgtttccgtgatggctatgcaataggcaccgggcgctggcgcgcgttgccgtttgctatcaacgtactgacccacagcagacagcgatatcgacgtaacttacgcttctatgctgatgacccaacgattcgcgtcggtgggccgacctaccattgggtacgcgaaagtattctggctggcgaacaggtgttagccggtgcgggtgatgacgccacgccaacgcttctcttgcaggctgaagaggaacgcgtggtggataaccgcatgcatgaccgtttttgtgaactccgcaccgccgcgggccatcctgtcgaaggaggacggccgttggtaattaaaggtgcttaccatgagatcctttttgaaaaggacgcaatgcgcagtgtcgcgctccacgccatcgttgattttttcaacaggcataacagtcccagcggaaaccgctctacagaggtttaaatttcttatgtaccaggttgttgcgtctgatttagatggcacgttactttctcccgaccatacgttatccccttacgccaaagaaactctgaagctgctcaccgcgcgcggcatcaactttgtgtttgcgaccggtcgtcaccacgttgatgtggggcaaattcgcgataatctggagattaagtcttacatgattacctccaatggtgcgcgcgttcacgatctggatggtaatctgatttttgctcataacctggatcgcgacattgccagcgatctgtttggcgtagtcaacgacaatccggacatcattactaacgtttatcgcgacgacgaatggtttatgaatcgccatcgcccggaagagatgcgcttttttaaagaagcggtgttccaatatgcgctgtatgagcctggattactggagccggaaggcgtcagcaaagtgttcttcacctgcgattcccatgaacaactgctgccgctggagcaggcgattaacgctcgttggggcgatcgcgtcaacgtcagtttctctaccttaacctgtctggaagtgatggcgggcggcgttagtaaaggccatgcgctggaagcggtggcgaagaaactgggctacagcctgaaggattgtattgcgtttggtgacgggatgaacgacgccgaaatgctgagcatggcggggaaaggctgcattatgggcagtgcgcaccagcgtctgaaagaccttcatcccgagctggaagtgattggtactaatgccgacgacgcggtgccgcattatctgcgtaaactctatttaagctaatcgttctttatttggtcagttgtcaacctgatacttcgctacaatggatacccgttaatcaaagagttttccattgtggcgctacttatcatcaccacgattctgtgggccttctcctttagcttttatggcgagtaccttgcggggcacgtcgatagctattttgcggtgctggtgcgcgttggcctggcggcactcgtttttctgccgtttctgcgtacccgtggcaatagcctgaaaacggtcggcctgtatatgctggtgggcgcgatgcagcttggcgtgatgtatatgctgagtttccgcgcttatctctacctgacggtttccgagctgctgctgttcaccgtgctgacgccgctctacatcacgctgatttatgacatcatgagtaagcgccgtctgcgctggggctatgcctttagcgccttgctggcggtgattggtgccgggattattcgctatgatcaggtcaccgaccatttctggactggcttgctgctggtgcaactctccaatatcacttttgccattggcatggtgggttacaaacgcctgatggaaactcgcccgatgccacagcataacgcctttgcgtggttctatcttggcgcgtttctggtggcagtgattgcatggttcttgctgggaaatgcgcagaaaatgccgcaaaccacgctgcaatggggcattctggtgtttcttggcgtggtggcttccgggattggctactttatgtggaactacggcgcgacgcaggtggacgccggaacgctgggcattatgaataatatgcacgttccggcagggctgctggtaaacctggctatctggcaccaacagccgcactggccaacgtttattacaggcgcgctggtgatcctggccagtctgtgggtgcatcgtaagtgggtcgctccgcgctctagtcaaacggcagatgatcgcaggcgtgattgcgcgctgagcgaataattacaggcgcgctggacttcctggcctcactgtgggtgcatcgtaagtgggtcgctccgcgctcttcacaaacggcagatgatcgcaggcgtgattgcgcgcactgcgaataaacgcttccgtaactggctgacgctgctcgccatcgcgcacggcggcgtacagtcggctccacaagccttcgcccagggttttggtcaccaccagaccctggcgctcaaaactctctactacccaatgcggtagcgcggcaatacccatccgcgcggcaaccatctgaatcaacaataaggtgttatcgacgcttttcagactcgggctgacgcctgccggctgaagaaaatgccgccagacatccagtcgactacgctgcaccggataaattaatagcgtctcgctggcgagatcttccggtgtaattcgcgttttcgccgccagtggatggtcaggtgctaacaccagacgcacttcatagtcgaacatcgggctataatgcaggccactgcgcggcagaatatcggacgtcattaccagatccagctctccctgttgcaaggcgggctgcgggtcaaatgtcacgccgcttttaaaatccatctctacctgcggccagttcttatggaaattttctaacgcgggtgtcagccactgaatacagctatggcactcaatggcaatgcgcagacgcgtctgctgcggttcattgcaggcttgcagggcctggctaatttgcggcagtacctggtttgccagttgcaacaggatttctccctgcggtgtaaagcgtagcggctggctcttacgcacaaatagccggaagccaaggcgttgttccagatcgctaaactggtgagacagggcggattgcgtctgatgcaacgtcgccgcagcggctgcgaggctgccgcagttccgcaacgcttgtagcgttttcaggtgttttacttcgatcatgaaagtccttcacttcggcatgaataatttgcgcttgaggaatatacagtaaccgccaattatggatgtgtaaacatctggacggctaaaatccttcgtcttttaaatttatggtgcgttggctgcgtttctccaccccggtcacttacttcagtaagctcccggggatgaataaacttgccgccttccctaaattcaaaatccataggatttacatataattagaggaagaaaaaatgacaatattgaatcacaccctcggtttccctcgcgttggcctgcgtcgcgagctgaaaaaagcgcaagaaagttattgggcggggaactccacgcgtgaagaactgctggcggtagggcgtgaattgcgtgctcgtcactgggatcaacaaaagcaagcgggtatcgacctgctgccggtgggcgattttgcctggtacgatcatgtactgaccaccagtctgctgctgggtaacgttccggcgcgtcatcagaacaaagatggtagcgtagatatcgacaccctgttccgtattggtcgtggacgtgcgccgactggcgaacctgcggcggcagcggaaatgaccaaatggtttaacaccaactatcactacatggtgccggagttcgttaaaggccaacagttcaaactgacctggacgcagctgctggacgaagtggacgaggcgctggcgctgggccacaaggtgaaacctgtgctgctggggccggttacctggctgtggctggggaaagtgaaaggtgaacaatttgaccgcctgagcctgctgaacgacattctgccggtttatcagcaagtgctggcagaactggcgaaacgcggcatcgagtgggtacagattgatgaacccgcgctggtactggaactaccacaggcgtggctggacgcatacaaacccgcttacgacgcgctccagggacaggtgaaactgctgctgaccacctattttgaaggcgtaacgccaaatctcgacacgattactgcgctgcctgttcagggtctgcatgttgacctcgtacatggtaaagatgacgttgctgaactgcacaagcgcctgccttctgactggttgctgtctgcgggtctgatcaatggtcgtaacgtctggcgcgccgatcttaccgagaaatatgcgcaaattaaggacattgtcggcaaacgtgatttgtgggtggcatcttcctgcagcttgctgcacagccccatcgacctgagcgtggaaacgcgtcttgatgcagaagtgaaaagctggtttgccttcgccctacaaaaatgccatgaactggcactgctgcgcgatgcgctgaacagtggtgacacggcagctctggcagagtggagcgccccgattcaggcacgtcgtcactctacccgcgtacataatccggcggtagaaaagcgtctggcggcgatcaccgcccaggacagccagcgtgcgaatgtctatgaagtgcgtgctgaagcccagcgtgcgcgttttaaactgccagcgtggccgaccaccacgattggttccttcccgcaaaccacggaaattcgtaccctgcgtctggatttcaaaaagggcaatctcgacgccaacaactaccgcacgggcattgcggaacatatcaagcaggccattgttgagcaggaacgtttgggactggatgtgctggtacatggcgaggccgagcgtaatgacatggtggaatactttggcgagcacctcgacggatttgtctttacgcaaaacggttgggtacagagctacggttcccgctgcgtgaagccaccgattgtcattggtgacattagccgcccggcaccgattaccgtggagtgggcgaagtatgcgcaaagcctgaccgacaaaccggtgaaagggatgctgacggggccggtgaccatactctgctggagcttcccgcgtgaagatgtcagccgtgaaaccatcgccaaacagattgcgctggcgctgcgtgatgaagtggccgatctggaagccgctggaattggcatcatccagattgacgaaccggcgctgcgcgaaggtttaccgctgcgtcgtagcgactgggatgcgtatctccagtggggcgtagaggccttccgtatcaacgccgccgtggcgaaagatgacacacaaatccacactcacatgtgttattgcgagttcaacgacatcatggatagcattgcggcgctggacgcagacgtcatcaccatcgaaaccagccgttccgacatggagttgctggagagctttgaagagtttgattatccaaatgaaatcggtcctggcgtctatgacattcacagcccaaacgtaccgagcgtggaatggattgaagccttgctgaagaaagcggcaaaacgcattccggcagagcgcctgtgggtcaacccggactgtggcctgaaaacgcgcggctggccagaaacccgcgcggcactggcgaacatggtgcaggcggcgcagaacttgcgtcgggggtaaaatccaaaccgggtggtaataccacccggtcttttctcattacaggctcttcttcccaccatactgcttaaaccattccagcatacgctgccagccatcttctgcagatgcggcatgatagctcgggcgataatcagcgttgaatgcatgcccggcgtccgggtacacgataatctctgctttcgcattagcagcccgcagcgcctggcgcatggtttcaacgctctcctgcggaatgctgttatcctgaccaccatataagccgagaatcggcgcgttaagatcggttgcgatatcaacaggttgtttcggactattcaggctcttgtcgcccgtcagtttgccgtaccacgccactgcggcttttagctgtggattatgcgcggcatacagccaggtgatacgtccaccccagcagaatccggtgatcattaaacgatgaacatcgccgccgttgcgggaagcccaactggcgacatgatcgagatcggccagcacctggctgtcaggcacttttgctaccagaccgctaagcaacgtggggatatcggcaaaatcattcggatcgccttcgcggaagtaaagttcaggtgcgatagccagatacccctccagcgccagacggcgacaaatgtcgcggatatgttcatgcacgccaaaaatttcctgcactacaatgaccactggcagtgggccatcgctttgctttggtctggcatggtaagcaggcatgttatccccttgactagggatagaggtgaagcccgccacaatcgcgtcgtccggggtctgaacgatggtgctagcgagagggcttgcagcaggtgcaaatccagattgttgtgttgttgccatggtattctccgtacccttataaaaatgttgcgcaatgttaactatagtcagcatgcaacaaatcacattgcctgaatcggctcatcttttatgcagtcctgcagaatgaagggtgatttatgtgatttgcatcacttttggtgggtaaatttatgcaacgcatttgcgtcatggtgatgagtatcacgaaaaaatgttaaacccttcggtaaagtgtctttttgcttcttctgactaaaccgattcacagaggagttgtatatgtccaagtctgatgtttttcatctcggcctcactaaaaacgatttacaaggggctacgcttgccatcgtccctggcgacccggatcgtgtggaaaagatcgccgcgctgatggataagccggttaagctggcatctcaccgcgaattcactacctggcgtgcagagctggatggtaaacctgttatcgtctgctctaccggtatcggcggcccgtctacctctattgctgttgaagagctggcacagctgggcattcgcaccttcctgcgtatcggtacaacgggcgctattcagccgcatattaatgtgggtgatgtcctggttaccacggcgtctgtccgtctggatggcgcgagcctgcacttcgcaccgctggaattcccggctgtcgctgatttcgaatgtacgactgcgctggttgaagctgcgaaatccattggcgcgacaactcacgttggcgtgacagcttcttctgataccttctacccaggtcaggaacgttacgatacttactctggtcgcgtagttcgtcactttaaaggttctatggaagagtggcaggcgatgggcgtaatgaactatgaaatggaatctgcaaccctgctgaccatgtgtgcaagtcagggcctgcgtgccggtatggtagcgggtgttatcgttaaccgcacccagcaagagatcccgaatgctgagacgatgaaacaaaccgaaagccatgcggtgaaaatcgtggtggaagcggcgcgtcgtctgctgtaattctcttctcctgtctgaaggccgacgcgttcggccttttgtatttttgcgtagcgcctcgcaggaaatgcctttccaactggacgtttgtacagcacaattctattttgtgcgggtaagttgttgcgtcaggaggcgttgtggatttcagtatcatggtttacgcagttattgcgttggtgggtgtggcaattggctggctgtttgccagttatcaacatgcgcagcaaaaagccgagcaattagctgaacgtgaagagatggtcgcggagttaagcgcggcaaaacaacaaattacccaaagcgagcactggcgtgcagagtgcgagttactcaataacgaagtgcgcagcctgcaaagtattaacacctctctggaggccgatctgcgtgaagtaaccacgcggatggaagccgcacagcaacatgctgacgataaaattcgccagatgattaacagcgagcagcgcctcagtgagcagtttgaaaacctcgccaaccgtatttttgagcacagcaatcgccgggttgatgagcaaaaccgtcagagtctgaacagcctgttgagcccgctacgtgaacaactggacggtttccgccgtcaggttcaggacagcttcggtaaagaagcacaagaacgccataccctgacccacgaaattcgcaatctccagcaactcaacgcgcaaatggcccaggaagcgatcaacctgacgcgcgcgctgaaaggcgacaataaaacccagggcaactggggcgaggtagtattgacgcgggtgttggaggcttccggtctgcgtgaagggtatgaatatgaaacccaggtcagcatcgaaaatgacgcccgcagccggatgcagccggatgtcatcgtgcgcctgccgcagggaaaagatgtggtgatcgacgccaaaatgacgctggtcgcctatgaacgctattttaacgccgaagacgactacacccgcgaaagcgcgctacaggaacatatcgcgagcgtgcgtaaccatatccgtttgctgggacgcaaagattatcaacagctgccggggctgcgaactctggattacgtgctgatgtttattcccgttgaacccgcttttttactggcgcttgaccgccagccggagctgatcaccgaagcgttgaaaaacaacatcatgctggttagcccgactacgctgctggtggcgctgcgcactatcgccaacctgtggcgttatgagcatcaaagccgcaacgcccagcaaatcgccgatcgtgccagcaagctgtacgacaagatgcgtttgttcatcgatgacatgtccgcgattggtcaaagtctcgacaaagcgcaggataattatcggcaggcaatgaaaaaactctctagtgggcgcggaaatgtgctggcgcaggcagaagcgtttcgcggtttaggagtagaaattaaacgcgagattaatccggatttggctgaacaggcggtgagccaggatgaagagtatcgacttcggagcgttccggagcagccgaatgatgaagcttatcaacgcgatgatgaatataatcagcagagccgctaacccattgggagtagttaagccgggtagaaatctagggcatcgacgcccaatctgttacacttctggaacaattttttgatgagcaggcattgagatggtggataagagtcaagaaacgacgcactttggttttcagaccgtcgcgaaggaacaaaaagcggatatggtcgcccacgttttccattccgtggcaagtaaatacgatgtcatgaatgatttgatgagttttggtattcatcgtttgtggaagcgattcacgattgattgcagcggcgtacgccgtgggcagaccgtgctggatctggctggtggcaccggcgacctgacagcgaaattctcccgcctggtcggagaaactggcaaagtggtccttgctgatatcaatgaatccatgctcaaaatgggccgcgagaagctgcgtaatatcggtgtgattggcaacgttgagtatgttcaggcgaacgctgaggcgctgccgttcccggataacacctttgattgcatcaccattagctttggtctgcgtaacgtcaccgacaaagataaagcactgcgtagtatgtatcgcgtgctgaaacccggcggccgcctgctggtgcttgagttcagcaagccaattatcgagccgctgagcaaagcctatgatgcatactccttccatgtgctgccgcgtattggcagtctggtcgcgaacgacgccgacagctaccgttatctggcagaatccatccgtatgcatcccgatcaggataccctgaaagccatgatgcaggatgccggattcgaaagtgtcgactactacaatctgacggcaggggttgtggcgctgcatcgtggttataagttctgacaggagaccggaaatgccttttaaacctttagtgacggcaggaattgaaagtctgctcaacaccttcctgtatcgcagtcccgcgctgaaaacggcccgcagccgtctgctgggtaaagtattgcgcgtggaggtaaaaggctttagcacgagtttgattctggtgttcagcgaacgccaggttgatgtactgggcgaatgggcaggcgatgctgactgcaccgttatcgcctacgccagtgtgttgccgaaacttcgcgatcgccagcagcttaccgcactgattcgcagtggtgagctggaagtgcagggcgatattcaggtggtgcaaaacttcgttgcgctggcagatctggcagagttcgaccctgcggaactgctggccccttataccggtgatatcgccgctgaaggaatcagcaaagccatgcgcggaggcgcaaagttcctgcatcacggcattaagcgccagcaacgttatgtggcggaagccattactgaagagtggcgtatggcacccggtccgcttgaagtggcctggtttgcggaagagacggctgccgtcgagcgtgctgttgatgccctgaccaaacggctggaaaaactggaggctaaatgacgccaggtgaagtacggcgcctatatttcatcattcgcacttttttaagctacggacttgatgaactgatccccaaaatgcgtatcaccctgccgctacggctatggcgatacagtttattctggatgccaaatcggcataaagacaaacttttaggtgagcgactacgactggccctgcaagaactggggccggtttggatcaagttcgggcaaatgttaagtacccgccgcgatctttttccaccgcatattgccgatcagctggcgttattgcaggacaaagttgctccgtttgatggcaagctggcgaagcagcagattgaagctgcaatgggcggcttgccggtagaagcgtggtttgacgattttgaaatcaagccgctggcttctgcttctatcgcccaggttcataccgcgcgattgaaaagcaatggtaaagaggtggtgattaaagtcatccgcccggatattttgccggttattaaagcggatctgaaacttatctaccgtctggctcgctgggtgccgcgtttgctgccggatggtcgccgtctgcgcccaaccgaagtggtgcgcgagtacgaaaagacattgattgatgaactgaatttgctgcgggaatctgccaacgccattcagcttcggcgcaattttgaagacagcccgatgctctacatcccggaagtttaccctgactattgtagtgaagggatgatggtgatggagcgcatttacggcattccggtgtctgatgttgcggcgctggagaaaaacggcactaacatgaaattgctggcggaacgcggcgtgcaggtgttcttcactcaggtctttcgcgacagctttttccatgccgatatgcaccctggcaacatcttcgtaagctatgaacacccggaaaacccgaaatatatcggcattgattgcgggattgttggcagcctaaacaaagaagataaacgctatctggcagaaaactttatcgccttctttaatcgcgactatcgcaaagtggcagagctacacgtcgattctggctgggtgccaccagataccaacgttgaagagttcgaatttgccattcgtacggtctgtgaacctatctttgagaaaccgctggccgaaattagctttggacatgtactgttaaatctgtttaatacggcgcgtcgcttcaatatggaagtgcagccgcaactggtgttactccagaaaaccctgctctacgtcgaaggggtaggacgccagctttatccgcaactcgatttatggaaaacggcgaagcctttcctggagagctggattaaagatcaggtcggtattcctgcgctggtgagagcatttaaagaaaaagcgccgttctgggtcgaaaaaatgccagaactgcctgaattggtttacgacagtttgcgccagggcaagtatttacagcacagtgttgataagattgcccgcgagcttcagagtaatcatgtacgtcagggacaaagccgttattttctcggaattggcgctacgttagtattaagtggcacattcttgttggtcagccgacctgaatgggggctgatgcccggctggttaatggcaggtggtctgatcgcctggtttgtcggttggcgcaaaacacgctgattttttcatcgctcaaggcgggccgtgtaacgtataatgcggctttgtttaatcatcatctaccacagaggaacatgtatgggtggtatcagtatttggcagttattgattattgccgtcatcgttgtactgctttttggcaccaaaaagctcggctccatcggttccgatcttggtgcgagcatcaaaggctttaaaaaagcaatgagcgatgatgaaccaaagcaggataaaaccagtcaggatgctgattttactgcgaaaactatcgccgataagcaggcggatacgaatcaggaacaggctaaaacagaagacgcgaagcgccacgataaagagcaggtgtaatccgtgtttgatatcggttttagcgaactgctattggtgttcatcatcggcctcgtcgttctggggccgcaacgactgcctgtggcggtaaaaacggtagcgggctggattcgcgcgttgcgtagtctggcgacaacggtgcagaacgaactgacccaggagttaaaactccaggagtttcaggacagtctgaaaaaggttgaaaaggcgagcctcactaacctgacgcccgaactgaaagcgagcatggatgaactacgccaggccgcggagagcatgaagcgttcctacgttgcaaacgatcctgaaaaggcgagcgatgaagcgcacaccatccataacccggtggtgaaagataatgaagctgcgcatgagggcgtaacgcctgccgctgcacaaacgcaggccagtagcccggaacagaagccagaaaccacgccagagccggtggtaaaacctgctgcggacgctgaaccgaaaaccgctgcaccttcccctagcagcagtgataaaccgtaaacatgtctgtagaagatactcaaccgcttatcacgcatctgattgagctgcgtaagcgtctgctgaactgcattatcgcggtgatcgtgatattcctgtgtctggtctatttcgccaatgacatctatcacctggtatccgcgccattgatcaagcagttgccgcaaggtagtacgatgatcgccaccgacgtggccagcccgttctttacgccgatcaagctgacctttatggtgagcctgattctgagtgcgccggtgattctctatcaggtgtgggcatttatcgccccagcgctgtataagcatgaacgtcgcctggtggtgccgctgctggtttccagctctctgctgttttatatcggcatggcattcgcctactttgtggtctttccgctggcatttggcttccttgccaataccgcgccggaaggggtgcaggtatccaccgacatcgccagctatttaagcttcgttatggcgctgtttatggcgtttggtgtctcctttgaagtgccggtagcaattgtgctgctgtgctggatggggattaccagcccagaagacttacgcaaaaaacgcccgtatgtgctggttggtgcattcgttgtcgggatgttgctgacgccgccggatgtcttcagccaaacgctgttggcgatcccgatgtactgtctgtttgaaatcggtgtcttcttcagtcgcttttacgttggtaaagggcgaaatcgggaagaggaaaacgacgctgaagcagaaagcgaaaaaactgaagaataaattcaaccgcccgtcagggcggttgtcatatggagtacaggatgtttgatatcggcgttaatttgaccagtagccaatttgcgaaagaccgtgatgatgttgtagcgtgcgcttttgacgcgggagttaatgggctactcatcaccggcactaacctgcgtgaaagccagcaggcgcaaaagctggcgcgtcagtatagctcctgttggagtacggcgggcgtacatcctcacgacagcagccagtggcaagctgcgactgaagaagcgattattgagctggccgcgcagccagaagtggtggcgactggtgaatgtggtctcgactttaaccgcaactttagcacgccggaagagcaggaacgcgcttttgttgcccagctacgcattgccgcagatttaaacatgccggtatttatgcactgtcgcgatgcccacgagcggtttatgacattgctggagccgtggctggataaactgcctggtgcggttcttcattgctttaccggcacacgcgaagagatgcaggcgtgcgtggcgcatggaatttatatcggcattaccggttgggtttgcgatgaacgacgcggactggagctgcgggaacttttgccgttgattccggcggaaaaattactgatcgaaactgatgcgccgtatctgctccctcgcgatctcacgccaaagccaagttcccggcgcaacgagccagcccatctgccccatattttgcaacgtattgcgcactggcgtggagaagatgccgcatggctggctgccaccacggatgctaatgtcaaaacactgtttgggattgcgttttaaagtttgcggaactcggtattcttcacactgtgcttaatctctttattaataagattaagcaatagcatggagcgagcctcaccatcgggttcggtgaaaatggcctgaaagccttcgaacgcgccttcggtaataatcaccttatcacccggataaggggttgccggatcgacaatgtctttcggtttatatacgcttagctgatgaataaccgcgcttgggactatcgctgggctcgcgccaaagcgcacgaagtggctgacaccgcgggtcgcgttgatagtcgtggtatgaatcacttctgggtcaaattccacaaacaggtagttggggaacaatggctcactgactgcagtacgttttccacgcacgattttttccagggtgatcatcggtgccaggcaattcacagcctgtctttcgaggtgttcctgggcacgttgaagttgcccgcgcttgcagtacagtaaataccaggattgcataatgactcttatccgtttaatcggggcgcaaggatagcaaaagctttacgctaagttaattatattccccggtttgcgttataccgtcagagttcacgctaatttaacaaatttacagcatcgcaaagatgaacgccgtataatgggcgcagattaagaggctacaatggacgccatgaaatataacgatttacgcgacttcttgacgctgcttgaacagcagggtgagctaaaacgtatcacgctcccggtggatccgcatctggaaatcactgaaattgctgaccgcactttgcgtgccggtgggcctgcgctgttgttcgaaaaccctaaaggctacagtatgccggtgctgtgcaacctgttcggtacgccaaagcgcgtggcgatgggcatggggcaggaagatgttagcgcgctgcgtgaagttggtaaattattggcgtttctgaaagagccggagccgccaaaaggtttccgcgacctgtttgataaactgccgcagtttaagcaagtattgaacatgccgacaaagcggctgcgtggtgcgccctgccaacaaaaaatcgtctctggcgatgacgtcgatctcaatcgcattcccattatgacctgctggccggaagatgccgcgccgctgattacctgggggctgacagtgacgcgcggcccacataaagagcggcagaatctgggcatttatcgccagcagctgattggtaaaaacaaactgattatgcgctggctgagccatcgcggcggcgcgctggattatcaggagtggtgtgcggcgcatccgggcgaacgtttcccggtttctgtggcgctgggtgccgatcccgccacgattctcggtgcagtcactcccgttccggatacgcttagtgagtatgcgtttgccggattgctacgtggcaccaagaccgaagtggtgaagtgtatctccaatgatcttgaagtgcccgccagtgcggagattgtgctggaagggtatatcgaacaaggcgaaactgcgccggaagggccgtatggcgaccacaccggttactataatgaagtcgatagtttcccggtatttaccgtgacgcatattacccagcgtgaagatgcgatttaccattccacctataccgggcgtccgccagatgagcccgcggtgctgggtgtcgcactgaacgaagtgtttgtgccgattctgcaaaaacagttcccggaaattgtcgatttttacctgccgccggaaggctgctcttatcgcctggcggtagtgacaatcaaaaaacagtacgccggacacgcgaagcgcgtcatgatgggcgtctggagcttcttacgccagtttatgtacactaaatttgtgatcgtttgcgatgatgacgttaacgcacgcgactggaacgatgtgatttgggcgattaccacccgtatggacccggcgcgggatactgttctggtagaaaatacgcctattgattatctggattttgccagccctgtctccgggctgggtagtaaaatggggctggatgccacgaataaatggccgggggaaacccagcgtgaatggggacgtcccatcaaaaaagatccagatgttgtcgcgcatattgacgccatctgggatgaactggctatttttaacaacggtaaaagcgcctgatgcgcgtttgttttgccctatttatcgatccgacagagaaagcgcatgacaaccttaagctgtaaagtgaccagcgtagaagctatcacggataccgtatatcgtgtccgcatcgtgccagacgcggccttttcttttcgtgctggtcagtatttgatggtagtgatggatgagcgcgacaaacgtccgttcagtatggctagcacgccggatgaaaaagggtttatcgagctgcatattggcgcttctgaaatcaacctttacgcgaaagcagtcatggaccgcatcctcaaagatcatcaaatcgtggtcgacattccccacggagaagcgtggctgcgcgatgatgaagagcgtccgatgattttgattgcgggcggcaccgggttctcttatgcccgcagcattttgctgacagcgttggcgcgtaacccaaaccgtgatatcaccatttactggggcgggcgtgaagagcagcatctgtatgatctctgcgagcttgaggcgcttagcttgaagcatcctggtctgcaagtggtgccggtggttgaacaaccggaagcgggctggcgtgggcgtactggcaccgtgttaacggcggtattgcaggatcacggtacgctggcagagcatgatatctatattgccggacgttttgagatggcgaaaattgcccgcgatctgttttgcagtgagcgtaatgcgcgggaagatcgcctgtttggcgatgcgtttgcatttatctgagatataaaaaaacccgcccctgacaggcgggaagaacggcaactaaactgttattcagtggcatttagatctatgacgtatctggcaaaccatgcccgatgcgacgctgtcgcgtcttatcgtgcctacaaatagtccgaaccgtaggccggataaggcgtttacgccgcatccggcaattggtgcatgatgcctgatgcgacgctgtcgcgtcttatcgtgcctacaaatagtccgaaccgtaggccggataaggcgtttacgccgcatccggcaattggtgcatgatgcctgatgcgacgctggcgcgtcttatcaggcctacattggtgccggatcggtagaccggataaggcgttcacgccgcatccggcaagtggttaaacccgctcaaacaccgtcgcaataccctgacccagaccgatacacatcgtcgccagaccaaactgaacgtctttgcgttccatcagattcagcagcgtggtgctgatacgcgcaccggaacaacccagcggatgacccagcgcgatcgcgccaccgttgaggttgatcttctcgtcaatctgctcaattagtcccagatctttaatacatggcaggatctgcgcggcaaaggcttcgttcatttcaaacacgccgatatcgctggcagaaagccccgcttttttcagcgccagtttgctggccggaaccgggccgtaacccataatgcttgggtcacaaccaacgaccgccatgctacgcacacgagcgcgcggcttaagacctaattcatgggcgcggctttcactcatcaccagcatggcagctgcgccatcggaaagtgcagaagatgtgcccgccgttaccataccgtttactggatcaaacgccggacgcagcgtggcgagggcttccacggtggtttccgggcgaatcacttcgtcgtaattaaactgcttcaggacgccgtcggcatcgtgaccaccggtcgggatgatttcatttttaaatgcggcgctctgcgtggcggcccaggcgcgggcgtgactccgcgcggcaaaggcatcctgcatttcacggctgataccgtgcatacgcgccagcatttctgccgttaagcccatcatgcccgccgctttggcgacattgcggctcaggccggggtgaaaatcgacgccgtgactcatcggcacatggcccatatgctccacgccgccaaccagacatgcctgcgcatcgccagtcatgatcattcgtgctgcgtcatgcagtgcctgcatggaactaccacacaagcgattaacggtaaccgccgggacagagtgtggtacttctgccagcagcgccgcgttacgggcgatattaaaaccctgctccagcgtctgctgcacacaaccccagtaaatatcgtcgagggccgccgcttccagcgccgggttacgcgccagcaggctacgcattaaatgagcggagagatcttctgcacgcacgttacgaaaagcaccgcccttgctacggcccatcggggtgcgaattgcatcgacaatgacaacctgttccattgtgactccttaagccgttttcaggtcgccaaccggacgggctggctcaaccggaggatagtacggttcgttatgacgcgctttattacgcagaccttccggcacttcatacagcgggccgaggtgctgatattgctgtgccatatcgaggtattttgcgctaccgagggtgtccagccagcggaacgcgccgccgtggaacggagggaagcccaggccgtagaccagcgccatatccgcttccgccggagtggcgataatgccttcctccagacagcgcaccacttcgttgaccatcgggatcatcatgcgggcgataatctcttcttcgctgaagtcgcgcttcggctggctcacttctgccagcaggtcttcaacggcggcgtcttcttctttcttcggcttacctttgctgtcttctttataacgccagaaaccgaggccgttcttctgaccaaagcggttggcatcaaacagcgcgtcgatggcatcgcggtaatctttctgcatccgctgcgggaagcctgctgccatgacagcctgagcgtgatgcgcggtatcaatgcccacaacgtccagcagatatgccgggcccatcggccagccaaactgtttttccatcactttgtcgatcttgcggaaatccgcgccgtcgcgcagcagctggctgaaaccggcgaaatacgggaacagcacgcggttaacaaagaagccggggcagtcgttaaccacaatcggcgtcttgcccatcttgctcgcccaggcgacaactttcgcgatggtttcgtcggagcttttctcgccgcgaataatttctaccaacggcattcggtggaccgggttaaagaagtgcatcccgcagaagttttccgggcgttccagcgcgttggccagttcgctgataggaatggtactagtgttagacgccagcacggtatcctggcgtactttttgttcggtttctgccagtacggcttttttcactttcgggttttcaacaaccgcttctaccacaatatccacgcggtcaaatccggcgtagtcgagcgttgggtggattgtggagatcacgccagccagtttcagaccatcgatcttgccgcgctcaagctgcttgttcagcagtttcgcggcttcggtcatgccgagggttaagctcttgtcgttgatatctttcatgacaaccggcacgcctttccacgcagactggtaagcgatgccgccgcccataatgcctgcacccagcaccgcggcctgtttcggggtttcaacgtctttggtgagtttcttcgctttgccttttacatattgatcgttaaggaaaatgccgaccagtgcgcgggcttcgttggtatgcgccagcgggacaaaacttttgttttccaggtttaaggcttcttcacgaccaaaacgggccgcagcttcaatggtttttactgcggtgatgggggccggataatgtttccccgctgtttgtgcgaccatccctttagcgatggtgaagctcatggtggcttcaatcttgctcagttttagtggttccagcttcggctgacgttttgctttccagtcgaggtcgccgttaatggcctggcgtaaaaccgcctttgcgccttcaaccagtttttctgctttgactacgccatccaccagaccgattttcagcgcctgatccgcgccgacatctttaccggcggcaatgatttccagcgcactgtcagcgcccagcatacgtggcatacgtacagaaccgccaaagccaggcatgatgcccagtttggtttccggcagaccgatgcgcagatccggcgtcgccagacgataatcggtcgccagcacgcattcgcagccaccgcccagcgcatagccattgacggcagcaatggtcggcaccggcagatcttccaggcgattaaacacgctattggcaaagtgcagccactgacttaactgttcttcaggaacgaggaacagggacaaaaattcggtgatatcagcaccgacgataaaggctgctttgttgctacgcagcagcagcccttttagatcactttgctgttccagcacgccgatggcctcgccgaggctggcgacggtcgcagtgtcgagtttattaacactacctggggcatcaaataccagttcggcaatgccatcttccagccagtcaaggtacagggtgtcgcctttgtaaagcatgtcagtctcctgaatccgcaaggtgatctggtcgtaccagatgagtcgaagtgtgtattttgtgttaaaaatatgcaaacaaaagattaaagaaatgccgatctgatcacgctcggcagaaatcacgctctggatgaacgatgtgctaagatgcggagacttaaggtcaaaaaaacagaagggtaaaaaatggaaagtctggccagcctctataaaaatcatatagctaccttacaagaacggactcgcgatgcgctggcgcgcttcaagctggatgcgttacttattcactccggcgagctgttcaatgtttttctcgacgatcatccctatccgtttaaagtgaacccgcaattcaaagcgtgggtgccggtaactcaggtgccaaactgctggttgctggtggatggcgtgaacaagccgaaactgtggttctatctgccggttgattactggcacaacgtcgaaccgctgccgacctctttctggactgaagatgtggaagtgatcgcgctgccgaaagccgatggcattggtagcctgctgcctgctgcgcgcggcaatatcggttatatcggtccggtgccggaacgtgcgctgcaactgggtattgaggccagcaacatcaacccgaaaggggttatcgactacctgcattactatcgctccttcaaaactgagtacgaactggcctgtatgcgtgaagcgcagaaaatggcggtcaacggtcaccgcgcggcagaagaagcgttccgttctggcatgagcgagttcgatatcaacattgcctatctgaccgcgaccggtcatcgtgataccgacgtaccttacagcaacattgtggcgcttaacgaacacgctgcggtactgcattacaccaaactggaccatcaggcaccggaagagatgcgcagcttcctgctggatgccggggcagaatataacggctatgcggctgacctgacccgtacctggagcgcaaaaagtgacaacgactacgcgcagctggtgaaggacgttaatgatgaacaactggcgctgatcgccaccatgaaagcaggcgtcagctatgtggattaccacatccagttccatcagcgcatcgccaaactgctgcgtaaacatcaaatcatcaccgatatgagtgaagaagcgatggtcgaaaacgatcttaccgggccgtttatgccgcatggtatcggccatccgctgggcctgcaggtgcatgacgtcgctggttttatgcaggatgatagcggtacgcacctcgcggcaccggcaaaatatccgtacctgcgctgcacccgtattctccagccgggcatggtgttaaccatcgaaccgggtatctacttcatcgaaagcctactggcaccgtggcgtgaagggcagttcagcaagcacttcaactggcagaaaattgaagcactgaaaccgttcggcggcattcgtatcgaagacaacgtggtgatccacgaaaacaacgtggaaaacatgacccgggatctgaaactggcgtgatggaaagctggttaattcctgcggcaccggtcacggtcgttgaagagatcaaaaagagccgcttcataacgatgttggcgcataccgatggcgttgaggcggcgaaagcgtttgttgaaagcgtgcgggcagaacaccccgatgcccggcaccattgcgtggcgtgggtcgcgggtgcgccggatgattctcaacagctgggtttctctgacgacggggagccggcgggaacggcaggtaaaccgatgctcgcccagctaatgggcagcggcgtcggggaaattaccgctgtggtagtgcgctactacggcggcatattgcttggcaccggtgggttagtgaaagcgtatggcggcggcgtgaatcaggcgctgcgccagctaacgacccaacgcaagacgccattaaccgaatatactttgcaatgtgaatatcatcagttaaccggcattgaagcgttgctggggcagtgtgacggcaaaattatcaacagtgattatcaggcattcgttctgctgcgggtggcgcttccggcggcgaaagtggctgaattttccgcaaagctggcggattttagccgtggtagtttgcaattgttagcgattgaagaataatccccacttcgttttgcagaactaaggaagcggcagagatgcattttcgcgccattacccgaatcgttggactactggtcatcttatttagtgggaccatgattatccctgggctggtagcactcatctaccgggatggagcgggccgcgcttttacccagaccttttttgtcgccctcgccattggctctatgctgtggtggccgaaccgcaaagagaaaggcgaacttaaatcccgtgaggggtttctgatagtggtgctgttctggaccgtgctgggtagcgtcggtgcgctcccttttatcttcagcgaaagcccgaacctcacgattaccgatgcgttttttgaatctttctctggcctgaccactacgggagccactacgctggtggggctggatagcctccctcacgccatcctcttttatcgccagatgctgcaatggtttggcgggatggggatcatcgtgttggcggttgcgatactgcctatcctcggcgtgggtgggatgcagctctatcgcgcagaaatgcccggcccgctgaaagataacaaaatgcgcccgcgaattgcggaaacggcgaaaaccctgtggttgatttatgtcttgctgaccgtcgcctgtgcgctggcgttgtggtttgccggaatggatgcctttgatgccatcggccatagctttgcgactatcgctattggcggcttcagcacacatgatgccagtatcggttatttcgatagcccgactattaacactatcattgctatcttcctgctgatctccggctgtaactacggtctgcactttagtctgttaagtgggcgtagtctgaaggtttattggcgcgatccggaatttcgcatgtttatcggcgtacagtttacgctggtggttatttgtaccctcgtactgtggtttcataatgtctacagtagcgcgctgatgacaattaaccaggcgtttttccaggtggtgagcatggcgacaaccgccgggtttacaactgacagcattgcccgctggccgctctttttgccggtactgcttttatgtagtgcctttatcggcggttgcgccgggagtacgggcggtggcctgaaggtgatccgcatcctgctgctgtttaagcaggggaaccgtgagctgaaacgactggtgcatccgaacgccgtctatagcattaagctggggaatcgcgcactgccggaacgtatcctcgaagccgtttggggatttttctccgcctatgcattggtgtttattgtcagtatgctggcgattatcgccacgggcgtggatgacttttctgcctttgcgagcgttgttgcgacattgaataacctggggccagggcttggcgtggttgctgataactttaccagtatgaacccggtggctaaatggatcctgattgccaacatgctgtttggtcgtctcgaggtctttacattgctggtgctctttaccccgactttctggcgtgaatgatggagtaatacgtgaaaacattaattcttttcagtacaagggacggacaaacgcgcgagattgcctcctacctggctagcgaactgaaagaactggggatccaggcggatgtcgccaatgtgcaccgcattgaagaaccacagtgggaaaactatgaccgtgtggtcattggtgcttctattcgctatggtcactaccatagtgcgttccaggaatttgtcaaaaaacatgcgacgcggctgaatagcatgccgagcgccttttactccgtgaatctggtggcgcgcaaaccggagaagcgtactccacagaccaacagctacgcgcgcaagtttctgatgaacagccaatggcgtcccgatcgctgcgcggtcattgccggggcgctgcgttacccacgttatcgctggtacgaccgttttatgatcaagctgattatgaagatgagtggcggtgaaacggatacgcgcaaagaagttgtctataccgattgggagcaggtggcgaatttcgcccgagaaatcgcccatttaaccgacaaaccgacgctgaaataagcataaagaataaaaaatgcgcggtcagaaaattattttaaatttcctcttgtcaggccggaataactccctataatgcgccaccactgacacggaacaacggcaaacacgccgccgggtcagcggggttctcctgagaactccggcagagaaagcaaaaataaatgcttgactctgtagcgggaaggcgtattatgcacaccccgcgccgctgagaaaaagcgaagcggcactgctctttaacaatttatcagacaatctgtgtgggcactcgaagatacggattcttaacgtcgcaagacgaaaaatgaataccaagtctcaagagtgaacacgtaattcattacgaagtttaattctttgagcgtcaaacttttaaattgaagagtttgatcatggctcagattgaacgctggcggcaggcctaacacatgcaagtcgaacggtaacaggaagaagcttgcttctttgctgacgagtggcggacgggtgagtaatgtctgggaaactgcctgatggagggggataactactggaaacggtagctaataccgcataacgtcgcaagaccaaagaggggtaccttcgggcctcttgccatcggatgtgcccagatgggattagctagtaggtggggtaacggctcacctaggcgacgatccctagctggtctgagaggatgaccagccacactggaactgagacacggtccagactcctacgggaggcagcagtggggaatattgcacaatgggcgcaagcctgatgcagccatgccgcgtgtatgaagaaggccttcgggttgtaaagtactttcagcggggaggaagggagtaaagttaatacctttgctcattgacgttacccgcagaagaagcaccggctaactccgtgccagcagccgcggtaatacggagggtgcaagcgttaatcggaattactgggcgtaaagcgcacgcaggcggtttgttaagtcagatgtgaaatccccgggctcaacctgggaactgcatctgatactggcaagcttgagtctcgtagaggggggtagaattccaggtgtagcggtgaaatgcgtagagatctggaggaataccggtggcgaaggcggccccctggacgaagactgacgctcaggtgcgaaagcgtggggagcaaacaggattagataccctggtagtccacgccgtaaacgatgtcgacttggaggttgtgcccttgaggcgtggcttccggagctaacgcgttaagtcgaccgcctggggagtacggccgcaaggttaaaactcaaatgaattgacgggggcccgcacaagcggtggagcatgtggtttaattcgatgcaacgcgaagaaccttacctggtcttgacatccacggaagttttcagagatgagaatgtgccttcgggaaccgtgagacaggtgctgcatggctgtcgtcagctcgtgttgtgaaatgttgggttaagtcccgcaacgagcgcaacccttatcctttgttgccagcggtccggccgggaactcaaaggagactgccagtgataaactggaggaaggtggggatgacgtcaagtcatcatggcccttacgaccagggctacacacgtgctacaatggcgcatacaaagagaagcgacctcgcgagagcaagcggacctcataaagtgcgtcgtagtccggattggagtctgcaactcgactccatgaagtcggaatcgctagtaatcgtggatcagaatgccacggtgaatacgttcccgggccttgtacacaccgcccgtcacaccatgggagtgggttgcaaaagaagtaggtagcttaaccttcgggagggcgcttaccactttgtgattcatgactggggtgaagtcgtaacaaggtaaccgtaggggaacctgcggttggatcacctccttaccttaaagaagcgttctttgaagtgctcacacagattgtctgatgaaaatgagcagtaaaacctctacaggcttgtagctcaggtggttagagcgcacccctgataagggtgaggtcggtggttcaagtccactcaggcctaccaaatttgcacggcaaatttgaagaggttttaactacatgttatggggctatagctcagctgggagagcgcctgctttgcacgcaggaggtctgcggttcgatcccgcatagctccaccatctctgtagtgattaaataaaaaatacttcagagtgtacctgcaaaggttcactgcgaagttttgctctttaaaaatctggatcaagctgaaaattgaaacactgaacaacgaaagttgttcgtgagtctctcaaattttcgcaacacgatgatgaatcgaaagaaacatcttcgggttgtgaggttaagcgactaagcgtacacggtggatgccctggcagtcagaggcgatgaaggacgtgctaatctgcgataagcgtcggtaaggtgatatgaaccgttataaccggcgatttccgaatggggaaacccagtgtgtttcgacacactatcattaactgaatccataggttaatgaggcgaaccgggggaactgaaacatctaagtaccccgaggaaaagaaatcaaccgagattcccccagtagcggcgagcgaacggggagcagcccagagcctgaatcagtgtgtgtgttagtggaagcgtctggaaaggcgtgcgatacagggtgacagccccgtacacaaaaatgcacatgctgtgagctcgatgagtagggcgggacacgtggtatcctgtctgaatatggggggaccatcctccaaggctaaatactcctgactgaccgatagtgaaccagtaccgtgagggaaaggcgaaaagaaccccggcgaggggagtgaaaaagaacctgaaaccgtgtacgtacaagcagtgggagcacgcttaggcgtgtgactgcgtaccttttgtataatgggtcagcgacttatattctgtagcaaggttaaccgaataggggagccgaagggaaaccgagtcttaactgggcgttaagttgcagggtatagacccgaaacccggtgatctagccatgggcaggttgaaggttgggtaacactaactggaggaccgaaccgactaatgttgaaaaattagcggatgacttgtggctgggggtgaaaggccaatcaaaccgggagatagctggttctccccgaaagctatttaggtagcgcctcgtgaattcatctccgggggtagagcactgtttcggcaagggggtcatcccgacttaccaacccgatgcaaactgcgaataccggagaatgttatcacgggagacacacggcgggtgctaacgtccgtcgtgaagagggaaacaacccagaccgccagctaaggtcccaaagtcatggttaagtgggaaacgatgtgggaaggcccagacagccaggatgttggcttagaagcagccatcatttaaagaaagcgtaatagctcactggtcgagtcggcctgcgcggaagatgtaacggggctaaaccatgcaccgaagctgcggcagcgacactatgtgttgttgggtaggggagcgttctgtaagcctgtgaaggtgtgctgtgaggcatgctggaggtatcagaagtgcgaatgctgacataagtaacgataaagcgggtgaaaagcccgctcgccggaagaccaagggttcctgtccaacgttaatcggggcagggtgagtcgacccctaaggcgaggccgaaaggcgtagtcgatgggaaacaggttaatattcctgtacttggtgttactgcgaaggggggacggagaaggctatgttggccgggcgacggttgtcccggtttaagcgtgtaggctggttttccaggcaaatccggaaaatcaaggctgaggcgtgatgacgaggcactacggtgctgaagcaacaaatgccctgcttccaggaaaagcctctaagcatcaggtaacatcaaatcgtaccccaaaccgacacaggtggtcaggtagagaataccaaggcgcttgagagaactcgggtgaaggaactaggcaaaatggtgccgtaacttcgggagaaggcacgctgatatgtaggtgaagcgacttgctcgtggagctgaaatcagtcgaagataccagctggctgcaactgtttattaaaaacacagcactgtgcaaacacgaaagtggacgtatacggtgtgacgcctgcccggtgccggaaggttaattgatggggttagccgcaaggcgaagctcttgatcgaagccccggtaaacggcggccgtaactataacggtcctaaggtagcgaaattccttgtcgggtaagttccgacctgcacgaatggcgtaatgatggccaggctgtctccacccgagactcagtgaaattgaactcgctgtgaagatgcagtgtacccgcggcaagacggaaagaccccgtgaacctttactatagcttgacactgaacattgagccttgatgtgtaggataggtgggaggctttgaagtgtggacgccagtctgcatggagccgaccttgaaataccaccctttaatgtttgatgttctaacgttgacccgtaatccgggttgcggacagtgtctggtgggtagtttgactggggcggtctcctcctaaagagtaacggaggagcacgaaggttggctaatcctggtcggacatcaggaggttagtgcaatggcataagccagcttgactgcgagcgtgacggcgcgagcaggtgcgaaagcaggtcatagtgatccggtggttctgaatggaagggccatcgctcaacggataaaaggtactccggggataacaggctgataccgcccaagagttcatatcgacggcggtgtttggcacctcgatgtcggctcatcacatcctggggctgaagtaggtcccaagggtatggctgttcgccatttaaagtggtacgcgagctgggtttagaacgtcgtgagacagttcggtccctatctgccgtgggcgctggagaactgaggggggctgctcctagtacgagaggaccggagtggacgcatcactggtgttcgggttgtcatgccaatggcactgcccggtagctaaatgcggaagagataagtgctgaaagcatctaagcacgaaacttgccccgagatgagttctccctgactccttgagagtcctgaaggaacgttgaagacgacgacgttgataggccgggtgtgtaagcgcagcgatgcgttgagctaaccggtactaatgaaccgtgaggcttaaccttacaacgccgaaggtgttttggcggattgagagaagattttcagcctgatacagattaaatcagaacgcagaagcggtctgataaaacagaatttgcctggcggcagtagcgcggtggtcccacctgaccccatgccgaactcagaagtgaaacgccgtagcgccgatggtagtgtggggtctccccatgcgagagtagggaactgccaggcatcaaataaaacgaaaggctcagtcggaagactgggcctttcgttttatctgttgtttgtcggtgaacgctctcctgagtaggacaaatccgccgggagcggatttgaacgttgcgaagcaacggcccggagggtggcgggcaggacgcccgccataaactgccaggcatcaaattaagcagaaggccatcctgacggatggcctttttgcattggcgcagaaaaaaatgccggatgcgacgctggcgcgtcttatccagcctactcttgcttatccgttctgcttttgcatccactccaccacaaaatcagccagcccctcaacatcattaatatccagtaatgcgacatcaagattaagcggcacatcactggctacagcaataacatgcctgtctatcactaattcttcaggtcgatgtccggctccatcgcgaaacagcacaatctttgcgatctcttcatgcttaaacccttcgaccagaatcaaatccagcttactggtatccattcgacttgcgagaaactgtagatccagctcttcttcgtctggtgtttccgtcatcaaggcccatcgttgctggctggcaacgatggtttgtaccgcgccagccttgcgcagctcatagctatctttgcctggcttatcaacatccatatcatggtgcgtatgcttaatcagccctggacggatccctctggcgcataatgccgggatcagttttttcaaaagcgtagtttttccggtaccactccacgcggcaaaggcgagtaacggtatcatcgtttttcctgccatcgggcaagctcctctggcgtattcacgttaacaaatgcatctttatgatcgctgaaatcaaccgcatgaccgccagccagacgcataaataccattacccggcgttctcctgcttgcagatattccagtaataaaggctcaatagcgcggtttaccagagcaatagtcgggtgatcgcgttcaccgtcatggacccacacgacaggcgcatctttgcgctgatgattaagcctggctgctaaatcagggggaatgtaaggcgtatcgcacgggcaaaacaaaaaccactcaccagcttcctgctgcattacactaagcattcctgccagagggcctgggtaatccgccagactatcttcaatcactttcagaccgcttgcctgatagatttcctgatgacgattagcattaaccacgacgtgagagagctgcgtcataagcgcgtcagcgacatgttgccataatggtttgccgtttaattcaagcaatcctttatctacgccgcccattcgtctggctttaccgcctgccagcacaacgcctgttatcgtcgtcatcagattcaccgatatcgcctcttttattgtgggattgaccctgctaacgtgtctgtctcaagagtaaggagcatcactatgaaatgtaaacgtctgaatgaagttattgaactcctccagccagcctggcaaaaagagccagaccttaacctgctgcaatttttgcagaaactggcgaaagagagtggttttgacggcgaactggcggatttgacggatgacattctgatctatcacctgaaaatgcgtgattccgcgaaagatgcggtgatcccgggtttgcagaaagattatgaagaagacttcaaaacggcgctgttacgcgctcgcggcgtaattaaagagtaaaagcttgtaagcggcgccaccaaaatcatcgtgaaatgatatccttcgtcattcgtaatgttttccggatgatgggatgaataacagcgcttttactttccagacactacacccggataccatcatggacgctctgtttgagcatgggatccgggtggattccggtcttaccccgcttaacagctatgaaaaccgtgtctatcaatttcaggacgaagatcgtcgacgttttgtcgtcaaattttatcgccctgaacgttggacagccgatcaaatcctcgaagaacatcaatttgcgttgcagctggtaaatgatgaagttccggtcgcagcacctgtggcctttaacggtcagactttattgaatcatcagggattttatttcgctgtttttccaagcgtcggtggtcgccagttcgaagctgataatatcgatcagatggaagcggttgggcgttatttagggcgtatgcaccagacggggcgcaaacagctttttatccatcgcccgaccatcggtttgaacgaatatctcattgagccacgcaagctgtttgaggacgctacactgataccttccgggttgaaagcggcattcctgaaagcgacagatgagctgattgccgccgttacagcacactggcgggaagatttcaccgttctgcggctacatggagactgccacgccgggaatattctctggcgcgatggtccaatgtttgttgatctggatgatgcacgtaatggtccagccgttcaggatttgtggatgttgctcaatggcgataaagccgagcagcggatgcaactggaaactattattgaagcttatgaagaatttagcgagttcgacaccgctgaaatcggactgattgaacctttacgcgccatgcgtttggtttattatcttgcctggctaatgcggcgttgggctgatcccgcgttcccgaaaaatttcccgtggttaaccggggaagattactggctgcgacagacggcgacttttatagaacaggcaaaagttctacaagaaccccctttgcaattaacacctatgtattaatcggagagagtagatcatgaaaaagatttggctggcgctggctggtttagttttagcgtttagcgcaagcgcggcgcagtatgaagatggtaaacagtacactaccctggaaaaaccggtagctggcgcgccgcaagtgctggagtttttctctttcttctgcccgcactgctatcagtttgaagaagttctgcatatttctgataatgtgaagaaaaaactgccggaaggcgtgaagatgactaaataccacgtcaacttcatgggtggtgacctgggcaaagatctgactcaggcatgggctgtggcgatggcgctgggcgtggaagacaaagtgactgttccgctgtttgaaggcgtacagaaaacccagaccattcgttctgcttctgatatccgcgatgtatttatcaacgcaggtattaaaggtgaagagtacgacgcggcgtggaacagcttcgtggtgaaatctctggtcgctcagcaggaaaaagctgcagctgacgtgcaattgcgtggcgttccggcgatgtttgttaacggtaaatatcagctgaatccgcagggtatggataccagcaatatggatgtttttgttcagcagtatgctgatacagtgaaatatctgtccgagaaaaaataattcaatgtaaattacataaagcccgtgaatattcacgggctttttttattatttaataaatataaatacattctgataatgcatcctgccgctggacattatttcagcataagtggatattcaaagttttgctgttttatcagggaatatttatatgatacgtaagagtgctacaggtgttattgttgcgttagccgtaatctggggtggtggcacatggtacacaggtacgcaaattcagcctggtgtcgaaaaatttattaaagattttaacgatgctaaaaagaaaggtgaacatgcctacgatatgacgttaagttatcaaaattttgacaaaggcttttttaattcccgttttcaaatgcaaatgacattcgataacggtgcacccgatctcaatatcaagccaggccagaaagttgtatttgatgtggatgttgagcacggtccgttgcccatcacaatgttaatgcatggtaatgtcatcccagcactggcagcggcaaaagtgaacttagtgaataatgaactgacacaaccgctatttatcgccgcgaaaaataaaagccccgtggaagcgacattgcgattcgcgtttggtggcagtttctctacgacattagatgttgcccctgcagagtatggaaagttttcttttggtgagggccagtttacttttaatggtgatggtagtagtttgtctaacctggatattgaaggcaaagtcgaagatattgttctgcaattaagtccaatgaacaaagtaacggcaaaaagttttaccattgattctctggcgcgattagaagaaaagaaatttccggttggtgaaagcgagagcaaatttaatcagattaacattatcaatcacggggaagacgttgcccaaatcgatgctttcgttgcaaaaaccaggctggatcgcgttaaagacaaagattatatcaatgtcaatctcacctacgaacttgataagttaacaaaagggaatcagcaactcggtagtggtgagtggagtttgattgctgaatctattgatcccagtgcagtgcgccaatttatcatccagtataacattgcgatgcagaagcagcttgctgcacaccctgagttagcaaacgatgaagttgctctgcaagaagtgaatgctgcattgttcaaagagtatttaccgttattacaaaaaagtgagccgaccattaaacaaccggtaagatggaagaacgcactcggcgaactaaatgccaatctggatatcagtattgccgacccagccaaatctagtagttccacaaacaaagatatcaaaagcctcaattttgatgtgaagttaccgcttaatgtcgtcacagaaaccgcaaaacagcttaatttatctgaaggaatggatgcggaaaaagcgcaaaagcaggctgataaacaaatcagcgggatgatgacattaggtcagatgtttcagttaatcacgattgacaacaataccgccagcctgcagctgcgttatacaccgggtaaagttgtttttaacggacaggagatgagcgaagaagaatttatgtctcgtgccggacgttttgttcattaaaatactcactcgcctctgctcattcagaggcgagtaaaacttacttattctgacgctgactactcatgagagacgtcagaagccggtctttttcctgccacaaactgttcagccattgctgaaaatggcgcttaaagcttttgtcattgatgtagtcgccatgtaactcatcggcaataggctgtaaatccacatgtacgacaatccgcgtcagtttaccgcttaacatatcgaagaacggctgacggttattgtccggataacacagcgtaacattaagcagtttatcgaattgtttacccagtacatttagcgccatcgcaatgcctgccgcctttggtggcaacaagttttgaaaagtggagtgggtttgctgatgtttttcttgcgtgaaacgggagccttcaacgaaattgacaatggtggtgggatgcaggcgaaacttttcacaagaacgccgagtggtttcaacatctttaccacgtcgctccggatgacgtaataaataagcgcgggaataacgcttcataaacggcatatccaggctccagcacgccaggccaagaaatggcacccaggccagctgttgcttgaggaaatatttattcatcggaatgtgcttacgaaacagcacgcacagtacgacaacatctgcccaactacggtggttacaaataagcagataccagttcttcttacttaacccttccagcccgtgaacttcccattgaaggtgtgggttcagatgcagtaataccgccagaccttcacaccagcaatacatcataaaatcacaaaaacggctaacctttcgccaaatgactggcacaggtagcaatagttttacaatcccggcaatgatgatcgggacggaacaaaaaatagtgaccaaaatggtcaatacgatactcagcaaaagggttatcgcagcgagtattctcgtcataatgaatttattcaaaaggttagccatagacagtgcgctaaagaagcgcaaggcgcagattttagcagaaaacgacccaaataacggatgatccttaaggagaaaaataattcatatctatccacattagaaaaaatcccattatctcaattattagggatggatttatttttaactgcatgaaaaacaaagacaaacatcatgctgtaaaaagcatgataataaattaaaagcgatgtaaataatttatgcacaaagttatccacatgacgatttgcgagcgatccagaagatctacaaaagattttcacgaaaagcggtgaaaaactcatgttttcatcctgtctgtggcatcctttacccataatctgataaacaggcacggacattatggttcagatcccccaaaatccacttatccttgtagatggtagttcttatctttatcgcgcatatcacgcgtttcccccgctgactaacagcgcaggcgagccgaccggtgcgatgtatggtgtcctcaacatgctgcgcagtctgatcatgcaatataaaccgacgcatgcagcggtggtctttgacgccaagggaaaaacctttcgtgatgaactgtttgaacattacaaaagtcatcgcccgccaatgccggacgatctgcgtgcacaaatcgaacccttgcacgcgatggttaaagcgatgggactgccgctgctggcggtttctggcgtagaagcggacgacgttatcggtactctggcgcgcgaagccgaaaaagccgggcgtccggtgctgatcagcactggcgataaagatatggcgcagctggtgacgccaaatattacgcttatcaataccatgacgaataccatcctcggaccggaagaggtggtgaataagtacggcgtgccgccagaactgatcatcgatttcctggcgctgatgggtgactcctctgataacattcctggcgtaccgggcgtcggtgaaaaaaccgcgcaggcattgctgcaaggtcttggcggactggatacgctgtatgccgagccagaaaaaattgctgggttgagcttccgtggcgcgaaaacaatggcagcgaagctcgagcaaaacaaagaagttgcttatctcagttaccagctggcgacgattaaaaccgacgttgaactggagctgacctgtgaacaactggaagtgcagcaaccggcagcggaagagttgttggggctgttcaaaaagtatgagttcaaacgctggactgctgatgtcgaagcgggcaaatggttacaggccaaaggggcaaaaccagccgcgaagccacaggaaaccagtgttgcagacgaagcaccagaagtgacggcaacggtgatttcttatgacaactacgtcaccatccttgatgaagaaacactgaaagcgtggattgcgaagctggaaaaagcgccggtatttgcatttgataccgaaaccgacagccttgataacatctctgctaacctggtcgggctttcttttgctatcgagccaggcgtagcggcatatattccggttgctcatgattatcttgatgcgcccgatcaaatctctcgcgagcgtgcactcgagttgctaaaaccgctgctggaagatgaaaaggcgctgaaggtcgggcaaaacctgaaatacgatcgcggtattctggcgaactacggcattgaactgcgtgggattgcgtttgataccatgctggagtcctacattctcaatagcgttgccgggcgtcacgatatggacagcctcgcggaacgttggttgaagcacaaaaccatcacttttgaagagattgctggtaaaggcaaaaatcaactgacctttaaccagattgccctcgaagaagccggacgttacgccgccgaagatgcagatgtcaccttgcagttgcatctgaaaatgtggccggatctgcaaaaacacaaagggccgttgaacgtcttcgagaatatcgaaatgccgctggtgccggtgcttagtcgcattgaacgtaacggtgtgaagatcgatccgaaagtgctgcacaatcattctgaagagctcacccttcgtctggctgagctggaaaagaaagcgcatgaaattgcaggtgaggaatttaacctttcttccaccaagcagttacaaaccattctctttgaaaaacagggcattaaaccgctgaagaaaacgccgggtggcgcgccgagtacgagcgaagaggtactggaagaactggcgctggactatccgttgccaaaagtgattctggagtatcgtggtctggcgaagctgaaaagcacctacaccgacaagctgccgctgatgatcaacccgaaaaccgggcgtgtgcatacctcttatcaccaggcagtaactgcaacgggacgtttaagcagtaccgatcctaacctgcaaaacattccggtgcgtaacgaagaaggtcgtcgtatccgccaggcgtttattgcgccagaggattatgtgattgtcagtgcggactacagccagattgaactgcgcattatggcgcatcttagccgtgacaaaggcttgctgaccgcattcgcggaaggaaaagatatccaccgggcaacggcggcagaagtgtttggtttgccactggaaaccgtcaccagcgagcaacgccgtagcgcgaaagcgatcaactttggtctgatttatggcatgagtgctttcggtctggcgcggcaattgaacattccacgtaaagaagcgcagaagtacatggacctttacttcgaacgctaccctggcgtgctggagtatatggaacgcacccgtgctcaggcgaaagagcagggctacgttgaaacgctggacggacgccgtctgtatctgccggatatcaaatccagcaatggtgctcgtcgtgcagcggctgaacgtgcagccattaacgcgccaatgcagggaaccgccgccgacattatcaaacgggcgatgattgccgttgatgcgtggttacaggctgagcaaccgcgtgtacgtatgatcatgcaggtacacgatgaactggtatttgaagttcataaagatgatgttgatgccgtcgcgaagcagattcatcaactgatggaaaactgtacccgtctggatgtgccgttgctggtggaagtggggagtggcgaaaactgggatcaggcgcactaagattcgcctgaacatgccttttttcgtaagtaagcaacataagctgtcacgttttgtgatggctattagaaattcctatgcaacaactgaaaaaaaattacaaaaagtgctttctgaactgaacaaaaaagagtaaagttagtcgcgtagggtacagaggtaagatgttctatctttcagaccttttacttcacgtaatcggatttggctgaatattttagccgccccagtcagtaatgactggggcgttttttattgggcgaaagaaaagatccgtaatgcctgatgcgctatgtttatcaggccaacggtagaattgtaatctattgaatttacgggccggatacgccacatccggcacaagcattaaggcaagaaaattattcgccgtcctgcgtttcttctacaggctgcatctcgctaaaccaggtatccagtttctgccgcagcttgtccacgccttgtttcttcaagctagaaaacgtttcaacctgcacatcaccgttaaacgccagtacagcttcacgcaccatattcaattgcgctttacgtgcgccgcttgccagtttgtccgctttggtcagcagcaccagaacggcgatattgctgtctaccgcccactcaatcatctgctgatccaaatctttcagcggatggcgaatatccattagcaccaccagaccttgcaggctctgacgtttttcgaggtattcgccgagcgcacgctgccatttgcgcttcatctcttccgggacttccgcataaccgtacccaggcaagtcaaccagacgcttgccgtcagccacttcaaacaggttgataagctgggtgcgccctggggttttactggtacgagccaggcttttctggttagtcagcgtgttcagcgcgctggatttacctgcgttggaacggcctgcaaaagccacttcaattccggtatcggaaggtaggtggcgaatatcaggcgcactcatcacaaaatgcgtctgttgataattcaaattagtcaaagcggtcgtctccgtcagtcaaagctttgtggcgattatacctgaaccataataaaaggcggatttttcggcgtgagcgttgtaagtaaaagccatacgctttgtgagacattgccgatagtctttatgcgaaatagcagagaaaattctgcgatgcatgtcaaataagctatataaatcagtgaattgcttttatataaaactctgaaaatgtgcaaatactgatggcggttgattgtttgtttaaagcaaaggcgtaaagtagcacccatagagcgaggacgctaacaggaacaatgactcaggatgagggtcaggagcgccaggaggcgaagacagaggattgtcaggaagacaaacgtccggagacgtaattaaacggaaatggaatcaacacggattgttccggctaaaggaaaaacagggtgtgttggcggcctgcaaggattgtaagacccgttaagggttatgagtcaggaaaaaaggcgacagagtaatctgtcgccttttttctttgcttgctttctgttagattccgccgcaaatctatactgaataaaacggctaaaagacgaaccattatgaaaccaagttctagtaacagtcgcagcaaaggtcatgcaaaagcgcgtcgaaaaacacgcgaggagctggatcaggaagctcgtgatcgcaagcgtcagaaaaaacgtcgtggtcatgcgccgggcagccgcgcagcgggcggaaacaccacgagtggcagcaaaggccagaacgcaccaaaagatccacgtattggcagtaaaacccctattccattgggcgtgactgaaaaagtcaccaaacagcacaaaccgaagagtgagaaacctatgcttagtccgcaggcggagttggaattactggaaacggatgagcgtctggatgcgctgctggaacgtctggaagcaggcgaaaccctgagtgccgaagagcaatcctgggtggatgctaaactggatcgtattgatgagttgatgcagaaactcggcctctcttatgacgatgacgaagaagaggaagaagacgagaagcaagaagacatgatgcgtctgctgcggggcaactaacggattgccgccgtgggccttcccgttctgctgataacccttccggttatatgttatctggtgtggttattcgttaaactacagcggttgtcgcggcgacaaaagtggctgcgcaaccggctgatgacccgaaacgggcatccgccggtacgccgtagccgccagagacgccatcggaaggagtgagcatgtctgtacagcaaatcgactgggatctggccctgatccagaaatataactattccgggccacgatacaccagctacccgaccgcgctggagtttagtgaagacttcggcgaacaggcgtttttacaagccgtggcgcgctatcctgagcgtccattatctctctacgtacatatcccgttctgccataagctttgttacttctgcggttgcaataagattgttactcgccagcagcacaaggccgatcagtatctggacgcgctggagcaagaaatcgtccatcgtgcaccgctgttcgccgggcgtcacgtcagccaattgcactggggcggcggaacgccgacgtatctgaataaagcgcaaatcagccgcctgatgaagctgctgcgcgaaaacttccagttcaatgccgatgcggagattagcatcgaagtcgatccgcgggaaatcgaactggatgtactcgatcatttacgcgccgaaggctttaatcgcctgagcatgggcgtgcaggacttcaacaaagaagtgcaacgtctggttaaccgcgagcaggatgaagagttcatctttgcactgcttaaccatgcgcgtgagattggttttacctccaccaacatcgacctgatttacggcctgccgaaacagacgccggagagtttcgcctttaccctgaaacgtgtggcggagctgaaccccgatcgtctgagtgtctttaactacgcgcatctgccgaccatttttgctgctcagcgcaaaatcaaagatgctgacctgccgagtccgcagcaaaaactcgatatcctgcaggaaaccatcgccttcctgacgcaaagcggctatcagtttatcggtatggatcactttgcccgtccggatgacgagctggcggtggcccagcgtgaaggcgtgctgcatcgtaacttccagggctacaccactcagggcgataccgatctgctggggatgggcgtttccgccatcagcatgattggcgactgctacgcgcagaaccagaaagagttgaagcagtactatcagcaagtggatgaacaaggcaatgcgctgtggcgtggtattgcgctaacgcgtgatgactgtattcgccgcgatgtgattaagagcctcatctgcaacttccgtctggattacgcccctattgagaaacagtgggatttgcacttcgctgattactttgcggaagatctcaagctgctcgccccgttagcaaaagatgggctggtggatgtggatgagaagggaatacaggtgacggcgaaaggtcgcttgctgatccgcaacatttgcatgtgctttgatacctatctgcgccagaaagcgcggatgcagcagttctctcgggtgatttaaatagtgaatggcgcttcgtttacaaagtagaaaacgaaagcgccatcaatgtgctgagaacaagattgcctgatgcgctgggcaacaaaacctgttgaaattattgcttttgtaggccggataaggcgtttacgccgcatcaggcatctgagcatgatgcctgatgcggcgctggtcgcgtcttatcaggcctacgactttctccgcatccggcataaacaacgagcttcagctaaacagcccaatcattgcggcacacagcacggcagcaacggcagtttgcggtgtgtggctgtcaactgcgccactcgataccagattaattattgattccagcataatgactctccccgttttccgggcaagatcatactgaacttatcggaacagtaaagcgtaaaataccagcaatttgcgctcaataatcaatctttacacacaagctgtgaatcactccatccccagctcttttaacttacgcgtcagggtgttgcggccccagccgagtagccgcgccgcttcctgtttatgcccctgcgtatgtcgcaacgcggtcgtcagtaacgtccgctccagctctggctgcgcttcggaaagcagattttgatgaccggaacgcagcgctctgtctgcccactgcgcaagaagcgtcgcccagctgtccggttgcatttggctagtactctccgcaaccgtactttcaaacagttcgccgggcaaatcctgaatcaacacttcctgcccggcggccatcaccgttagccagcggcaggtgttttccagctggcgcacgttgcctggccacgccagacgcgtcagagcagcttcggtttccggatgcagtaacttcgcttctacgcccagttcgcgcgcggcaacctgtaaaaaatggcgcgccagacggggaatatcttcccgacgttcgcgcagcggcggcagatgaacgcggataacgttcaggcggtggaacagatcctcacggaacttaccttcctgcactcgctgttcgagattctggtgagtggcagcgataatccgcacatccactttcaccggcgcatagccgccaacgcggtaaaactgaccgtctgccagcacgcgcagcaaacgcgtctgcacatccagcggcatatcaccaatttcgtcgaggaataatgtaccgccatcggcctgttcaaaacgcccctgacgaatggtattcgcgccagtaaacgcgcctttctcgtggccaaacagttcactttcgatcaaatcttttgggatagctgccatattcagcgcgataaacggcgctttggcgcgcggactgtggcgatgcagggcatgagcgaccagttctttaccggtgccggattcgccgttaatcagcacgctaatagaagaacggctaagccgaccgataatacggaacacgtcctgcatggctggcgcttcgccgatgatatcggtcgttgggccgttaagctgaacattacgcggctgctgctgttcctggtaatgactgatagcgcgctcaaccagcgccactgcttcgtcgatatcaaacggtttgggcagataatcaaacgccccttgttgataggcgctgacggcagcatccagatcggaatgtgcggtcataatgatgaccggaagcattggatggcgctgtttaatctgcttgagcagcgccagcccgtccattcccggcatacggatatcactaagcagcacatccggcgttttgctcgccagcgcctccagcacttctgcgccgttctcaaacgtcgtacaggttaaacctgccccagcgagcgcacgttcaagcacccaacggatggaactatcgtcatcgactacccagactatccctcgttgcataaacgtcacctttatttcctgataggcaggtaaacgctgaactcggtatgccctggccaactggtaaattcaattttgccactatgctgatcaatcaaattacgagcgatggataagccaagcccggtgccaccttcgcggccgctgaccatcgggtaaaacagcgtatcctgcaaatgaggcggaatgcccggcccgttatcttccacatcaatccgcgccgccagccggtagcgctcgccgtgtaaggtcagttgaaacgcggtgcgggtacgcagaatgatttcaccgccttccggccccagcgcctgtagcgcattgcgcacaatattcagcaagacctgttcaatttgatccgggtcgtgcgccagttccggtaggctgggatcgtaatcacgaatcaaccgcacgttgtccggcagttccatgctcaccagcgttaccacgcgttcagccactttgtgaatactttcggtaacgcgcgtaccgggcagctgcggccccaacagacggtcgaccagatttcgcagccggtccgcctgttcgataatcactttggtatattcgagtagacttgggtcaggtaacgctttgctgagcagctgcgccgcgccacgtaaaccgccaagcggatttttaatctcatgtgccaggccgcgcactaaatcacgggcagcaacctgctgggcgtgctgtagctgttcctgacttaagcggcgctggttatccatcggagccatctccagcaggatcatgccgtccggcatacgctgggccgtcacagaaaggatatggctgcgcccgtcgatgaccagcgtcacttcgttatcggtaaaaccttgccccgcctccagactttcttgcatcagctcgatatttaaactgaagtagctcaacagttccggtaacggtgtaccaaacaatttgcgggagctttgggcgagcagttgttgcgcggcagggttggcgtaatggatcgccaggttgtcatcgattaacaaaatactgttaatcaggctgttgaggatctgcccagcatcgggctgcgtgcctgttgccataaagcagtctcctgaacaggttgcaccattttagtgcattatagctttttacggataaaaagcgcgaagcatcagagaattgacggagaaaaaagcccatgcagagatgggctacagatagctgacaaacttcacgttggagagcgactcacctgctccggcctaccacatcatcaccgtgtaggccggataagacgcatttgcgtcgcatccggcgtgatgtgcttgccaccgatcccaggcctgccagagacaggcgaaaagtttccacggcaactaaaacacttagacgctgtagtacagctcaaactctaccggatgcggagtcatacgcacgcggtcatcttcttcgcgacgcagagcgatgtacgcatcaattgcttcgtcagtgaacacgccaccggctttcaggaactcgcggtccagatccagttcgttcagtgcttcttccagagagcctgcaacctgtgggatctctttcgcttcttctggcggcaggtcatacaggtttttgtccatggcttcgcccggatggatcttgttcttgataccatcaagaccggccatcagcagggcagcaaagcacaggtacgggttagctgccggatccgggaaacgtacttcgatacgacgtgctttcggagaagaaaccaccggaatacggatagacgcagaacggttacgcgcagagtaagccagcattaccggtgcttcatagcccgggaccagacgcttataagagttggtggtcgggtttgccagggcgttaatcgctttagcgtgtttgattacgccgccaatgtagtacagcgcctgctcagacagacctgcgtatttgtcgcctgcgaacaggttaacgccgtttttagacagagacatgtggcagtgcataccggagccgttatcaccgaacatcggttttggcataaaggtcgcggttttaccgaagcggtgcgctacgttgtgcacaacatatttgtagatctgaatttcgtcagcttttttggtcatggtattgaagcgggtagccacttcgttctgaccagcagtcgctacttcgtggtgatgggcttcaaccaccagacccatctgttccatcaccagacacatttcagaacgaatatcctgagcgctgtctaccggtggaaccgggaagtaaccgcctttcactgccggacggtgacctttgttaccaccttcgtattgggtggaggagttccatgcgccttcgatatcgtcgatagcaacgtgggaaccggagatagaacttccgaaacggatgtcatcgaacaggaagaattcaggttctggcccgaacagtacggtgtcggcaatgccagtggaacgcaggtaatcttcggcgcgcttcgcaatggagcgcgggtcacggtcatagccttgcagggtgccaggttcaaggatgtcgcaacggataatcagggtggagtcggcgaagaacgggtcaatcactgcggtggatgcgtctggcatcagcaccatgtcggactcgttaatgcctttccagccgccaatgctggagccgtcaaacattttgccttcttcgaagaattcagcattcacctgatgagcagggatagtgacgtgctgttctttacctttagtatcggtgaagcgcaaatcaacaaacttcacttcgtgctcgttcagcatcgtcagtacgtgttcagcggacatactttaactctcctggattggtcatggtcgtcgtggtaacgaaatctgcaattattttggccgtgtcgccgtaaaaaagataaagcgaaatctgtgccaacttttaaattgcccctaaaaggcgttatcatgcgcaccatcgtgcaaaagggctgcaccacgatgtgaatgttgcaccaatatagtgcttcaatggaaacattaagcaccatgttggtgcaatgacctttggataaccctttttatgctccgtgaaagcgatcacaaagggactctgcaatacttgtttgcggaggatgtttgtgatcctgttttgtagtgcgattaatccgtgtacaataacgcgctatttctaatgcctgaggcaaagttgtgatcgaaaaattgcgtaatatcgccatcatcgcgcacgtagaccatggtaaaaccaccctggtagacaagctgctccaacaatccggtacgttcgactctcgtgccgaaacccaagagcgcgtgatggactccaacgatttggagaaagagcgtgggattaccatcctcgcgaaaaacaccgctatcaaatggaatgattaccgtatcaacatcgttgataccccggggcacgccgacttcggtggtgaagttgaacgtgtaatgtccatggtagacagtgtgctgctggtggttgacgcatttgacggcccgatgccgcaaacgcgcttcgtaaccaaaaaagcgtttgcttacggcctgaagccgattgttgttatcaacaaagttgaccgccctggcgcgcgtcctgattgggttgtggatcaggtattcgatctgttcgttaacctcgacgcgaccgacgagcagctggacttcccgatcgtttacgcttctgcgctgaacggtatcgcgggtctggaccacgaagatatggcggaagacatgaccccgctgtaccaggcgattgttgaccacgttcctgcgccggacgttgaccttgacggtccgttccagatgcagatttctcagctcgattacaacagctatgttggcgttatcggcattggccgcatcaagcgcggtaaagtgaagccgaaccagcaggtcactatcatcgatagcgaaggcaaaacccgcaacgcgaaagtcggtaaagtgctgggccacctcggtctggaacgtatcgaaaccgatctggcggaagctggcgatatcgttgcgatcacgggccttggcgaactgaacatttctgacaccgtttgcgacacgcaaaacgttgaagcgctgccggcactctccgttgatgagccgaccgtttctatgttcttctgcgttaacaccagcccgttctgcggtaaagaaggtaagttcgtaacgtctcgtcagatcctggatcgtctgaacaaagaactggtacacaacgttgcgctgcgcgtagaagaaaccgaagacgccgatgcgttccgcgtttctggtcgtggcgaactgcacctgtctgttctgatcgaaaacatgcgtcgtgaaggtttcgaactggcggtatcccgtccgaaagttatcttccgtgaaatcgacggtcgtaaacaagagccgtatgaaaacgtgactctggacgttgaagaacagcatcagggttctgtaatgcaggcgctgggcgaacgtaaaggcgacctgaaaaacatgaatccagacggtaaaggccgcgtacgtctcgactacgtgatcccaagccgtggtctgattggcttccgttctgagttcatgaccatgacttccggtactggtctgctgtactccaccttcagccactacgacgacgtacgtccgggtgaagtgggtcagcgtcagaacggcgtactgatctctaacggtcagggtaaagcggtcgcgttcgcgctgttcggtctgcaggatcgcggtaagctgttcctcggtcacggtgcagaagtttacgaaggtcagattatcggtattcatagccgctctaacgacctgactgtaaactgcctgaccggtaagaaactgaccaacatgcgtgcttccggtactgacgaagccgttgttctggttccgcctatccgcatgactctggaacaagctctggagttcatcgatgatgacgaactggtagaagtgactccgacctctatccgtattcgtaaacgtcacctgacggaaaacgatcgtcgccgcgccaaccgcgcaccgaaagacgattaatttcgttttttagtcataaaaaacctgccagcgatggcaggtttttttttgcctgtcgtgagcgcacaccaatgcgagtatctcccttataagtctgtggttacgtcaatagagagctttgtcacaattatctgcaaagtcatacgccgttaattgctttcttttttggcgtaagcgtaagatgcttcatctggtttaaaccaaaaggattaaacaatggcggagaatcaatccaccgtagaaaatgcaaaagagaaactggatcggtggttgaaagatggcatcaccacgccgggtggaaaactccctagtgaaagagagctgggagaactgctgggcattaaacgtatgacgctgcgccaggcgttgttgaacctcgaggcagaatccaaaatcttccgtaaggatcgtaaggggtggttcgtgacccagccgcgatttaattacagtccggagctgagcgcgagctttcagcgggccgcaattgagcaagggcgagagccttcctgggggtttaccgagaaaaaccgtaccagcgatattcccgagacgctcgcgccactgattgcagtgacgccaagtactgaactctatcgcatcaccggctggggggcgctggaaggacataaagttttctatcacgaaacatatattaatcctgaagttgctccgggctttattgaacaacttgaaaaccacagtttttctgcagtctgggaaaagtgctaccaaaaagagacggtagtaaaaaaattgattttcaaacccgtcagaatgccgggcgatatcagcaagtatcttggcggttctgcgggtatgccagcgatcttaattgaaaagcatcgcgccgaccagcaaggcaatattgtccaaatagatattgaatattggcgatttgaggccgtagacctcatcattaatctgtaagtgttttatggtgacaataaataacgcaagaaagattctacaacgtgtcgacactcttcctctttatttacatgcttatgcctttcatttaaatatgcggctggaaagagtgttgcctgctgatttacttgatatcgcaagtgaaaataatctacgtggcgtcaaaatccatgttctcgatggcgagcgtttttctcttggtaatatggacgataaagaactctctgcctttggggataaagcccgccgtctgaaccttgatattcatattgaaaccagcgccagtgataaggcatctattgacgaagccgtcgccatcgcgttgaaaactggggcaagctccgtacgtttttatccacgttatgaaggtaatttgcgcgacgtattaagcattatcgctaacgacattgcctatgtacgggaaacgtatcaggacagcggcctgacttttacgatcgagcagcatgaagatttaaaaagtcatgagctggtgagcctggtcaaagaaagtgagatggaatctctttccttactgtttgattttgcgaacatgatcaatgcaaatgagcatcccatcgacgctttaaaaacgatggcaccgcatattacccaggtccatatcaaagatgccttgatcgttaaagaaccgggtggcctgggtcataaagcctgtattagtggtcagggtgatatgccgttcaaagcgttattaacgcaccttatctgcctgggtgatgatgagccgcaggtgacggcatatggcctggaagaagaggttgattactatgcgccggcgttccgctttgaagacgaagatgataatccgtggatcccttatcgccagatgagtgaaacaccattgccagaaaatcatttactggatgcgcggttacgtaaagaaaaagaagatgcaattaatcagataaatcatgtgcgtaacgtactacaacaaatcaaacaagaggcaaaccatcttctgaaccactaataagttttaactcatacgcagttaataaaaccattccatatgaatggtcggtatcttattgcctttaaaacagtgattttaaaaatcgcttaggggatgttatgctcacgaaaaagaaatgggcgttatttagtctattaacactgtgtggcggtacaatttataaattaccgagcctgaaagatgcgttttatatcccgatgcaggaatatttccatttgaccaatggtcaaattggtaatgctatgagcgtaaacagttttgtcaccacagtgggcttttttctgtctatttattttgccgataaactaccgcgcagatacaccatgagtttcagtctcattgcgacaggattactgggtgtttatttgacgacaatgccggggtattggggcatcctctttgtctgggcgctatttggcgttacttgcgacatgatgaactggccggtcttgctcaagagcgtaagtcgattgggcaatagcgaacaacaaggtcggttgtttggcttcttcgaaacagggcgtggcattgtcgataccgtggtggcattttctgcgttggcagtatttacctggtttggcagtggcttattaggttttaaagcaggcatctggttctattcccttattgtgattgccgtaggcattattattttctttgtcctgaatgacaaagaagaggcaccgtccgttgaggtgaaaaaagaagacggagcaagcaaaaacaccagtatgaccagcgtgctgaaagacaaaactatctggcttatcgcttttaacgtcttcttcgtttacgcggtttactgtggcctgacattcttcattccattcctgaaaaacatctatctattgcccgttgcgctggtgggggcttacggcatcattaaccaatactgtctgaaaatgattggtggaccgattggtggcatgattagtgataagatcctgaaaagcccaagtaaatatctatgctacacctttatcattagtaccgctgcgctcgtactgttgattatgctgccgcacgaaagtatgccggtctatttagggatggcatgtacgctgggctttggcgcgatagtctttacacagcgagccgtattttttgcacctatcggcgaagcaaaaattgctgaaaataaaacaggtgcggcgatggcgttgggtagctttattggttacgctccggcgatgttctgcttcagtctgtatggctacattctggatttaaatccggggattattggctacaaaatcgtgtttggcattatggcctgcttcgcattcagtggtgcggtggtttccgtaatgctggttaagcgtattagccaacgtaagaaagagatgctggcggctgaagcttaattaatggccggatgtgcttaatccggccaacgaaaaccgtatcaaccgtaggccggataaggcgtttacgccgcatccggcagtttcacatcagaagaaatacttcgtcccgatacggatctggttttgctcgcggtggtacggttcgacgttgcggtctaaccagcgcaattcgaaataagggagccagtgttcattaatacggtaacggaaggtgttagtgatttcccaatgatgatctttcccgttgctactattaaagtcattcactcgcatgaagtaatgtggctcaaatgtataggaaaatttatcggtgattttaaaattccagtaggtgccaatttcataggtgtcattattatccagttccccgctcaaatctgtactactatagttattatggttatagcgatttcgtactgtcagattaaaccatggtacaaatttatagttgacgtccagatacactgcaccaccgctaccgatactcttatcattaattaagccaccgggctggatggttaatttatcggttggtttaaataacggataccagccttcaatttcgttatatccatgttttagttcatcttctcgctgaaagttgtaggtattggttaacataatacccgcgcccatatcgaagttataacccacacgtagcataacctcgccctgatcggaggcaagattatatgcctccctgttttcgacgtatgcgccagcaaatacgctggcagaggtcagagaagataataaaattattgcattaatctttttcataataagtccattttttaaacgtagggaggccgccacccaccaggatggaaatagcggctattgacatttataacgttacggaagccgttttttcttctgtcgccatctctttatttttgcgttggttgatttcctcaataatcaatgcaaaccgtttttcattgagtgtgtaaaagaatcccatcgtcaatgcagcaataattgccagtgcacaaggccagataaaaatgagctgacgcaaaccctgtaatgtcgcatcgctttgcgcgatgttgggaacataaccaatttgcgtcagcataatgcctggcaagaagccagcaagtgcggcagaaattttacgaaagaaggtataaccggtataaacagaaccttcggcacgaataccggttttccattcaccgtaatctacggtatctggtaccagtgcccagttcaggctgtttacaaaggccgtgccaaaaaaggcgacacaagagaacatgacgaaagtgaaagagttacttccccagaaataattcagtatatcacccaccgcccacagcaccatgccagccagataaacctgttttttaccaaaacattttacagttaatggcaccagtaatacgccgatgaggatgcatcccatactgaagaatcccatccagctcaataaattaatatcattcagcacatactgggtgtaatagacctgaatcgccagtttgatattaaatgccgccagggtacacaagttagcaatgcataaaaccagcaatggcggattccgaaatatcgcgcaaaaacttttgagaatactggctttatgtccggttggcgttgtgtccacataatgctctttgacgcctctgtagcacagcatcataaaaataaagccgccaatggagaacataagtgccgcacaggcataaccgacggtactgtcagaaaaaaggctctgcaacggaataaacgccacggtacaaatcaatagccctatggttgcaccaccctggcggtaagccgcgagctgcgcgcgctcattcgggtttttggtaattgccgggatcatcgcaccatagctgcagttcatcagactgtaactaagtccaaacatcataaacagcgcggtggcaatcgtcgttttaaccggcaaacaaaaggtggtggcgataaactggagcgttgcaattaacgccgccggaaccgctgcatataaaataaagggacgaaatttgcctttaggcccaatatttttccggctgtcgagtaaaaatccggtgagcatatcggtaaacgcggtaaaaaacttcgccaccagaaagataatcccgccatagtaagcaggcatccctaattcatcggtataaaatttgaggagatacagagtaccgatgcagagcattaaattgctaccgacgtcgcccataccataggcgattttttcccgcagattcagttttaatgtcagtggattatggtcagacataatcactccttataacgccccgcagggcgtcgtttattattattacgccgtgcgtttacgggcttctatctcttccacaatgcggacatacatcttctcgttcaggctgtagaagcaacccatcgccacaatggtgactaccgccagtgcgcttgggtagatgaagatcaactggcgtaacccttcaatggtgtggtcagcctgtgcgacgttcggcacatagccaatttgcgtcagcatccagccggggaagaaaccagccagcgcctgagacactttgcgaaagaaggtaaaaccggtgtagaccgttccttcgctacgcacgccggtgcgccactcgccgtactcgacggtgtcggaaaccagcgcccagttcaggctgttaacaaacgcactgccaaagaacgccaggcaggagaacgccacgaagctgacgctaccgccgccgaagaaatagttgagcagatcgcccagcacccaaatcagcaggccgccgatataaactttcttcttgccaaaacgtctgacactggcaggcatcaggaatacgccgatgaaaatacagcccatgctgaaaaatcccatatagctcaacaggatgggatcgttaagcacgtactgggtgtaatagacctggatggcgagcttgacgttaaacgcccctaaagtgcagaggttggcaatgcacagaatgaacagcgggcggttacccgcaattgcgcggaaagattgcagcaggcccggcttttgcgccggattagcaggctgggtttcgacataacgctctttcacgccgctgtagcagatccacataaacagcaggccaaacagactaaacagcgtggcggcgaagatatagccaagttgctgattaccttcgataagattcataactggcacgaatcccaccgtgcacagcagcaggcccagcgtagcgccgccctgacgccatgccgccagactggcgcgttcgttggggtttttggtgatagcgggaaccattgcgccgtaggagcagttcatcatgctgaaaaacagtccgtaaagcataaacagaatagtggccatcaccgttttaccggtgacatcaaacggtgtgccgacaaagttggcgatcgccagtaaggtgaccgggaaactcgcatacagaataaaaggacggaacttaccttttggaccgatcttgcgtcgggaatccaacataatgccggtacccatatcggtaaacgcagtaaagaatttactaatcaaaaagataatgccgccataggtgcctggcagccccagaacgtcggtataaaacttcaaaagataaagcgtaccgatatccagcaggatgttagaggccaggtcgccaataccgtaagagagtttctctttaaagggcaggcgtaaagttgctggatcttccgttgtgatgtgactcatgcttgttctccctttgcccatgagtttccccacgggcggatgtgattagatgctttttaagctcgcgaacagtgccgcccattcgctatcggcgcgataaaagaccggcggcttgccgatgggcgcattaacggtaacttccccgccccggaacgcttcacccgtccaggcgtggacccagttatcctccggcagatagagcgtccagtcgctacggccttcttcatgcaccggagcgaccagaatgtcgcgacctaacaggtactgatatttcagggtgtaagtgtgcgcatcgtcttcgtaatgcaggaacagcgggcgcataaccggcaggccggacttcgcattcagcgcgacggcctctttcaggtaaggtttcagggtggtgaagacggtggtcatacgggcgaaatgggcgatggtttctgcgtcgccgtcaaactgccagttgtcgccaggacggttaccttcgtgggtgcgcatcatcggcgtgaaggcgctgaaatcgcaccagcgcagcagcagctctttgctgcgcttcatctcaaacagggtggtgtaaccgccaatgtcgctgtggtgcaggccatgtccggtcattgccaggctcagcgccgccgggacaacgctcgccaggccatcgtcgagactccagtcgacgttctggtcgcccgcccacatcatggtggagtatttctggctaccggtagaaccggcgcgcataaagaaaaggatctcgccgagcttgcccgtttcttcaagggcttcgtagttacacttcgcccacagcgcaggccaggcgttatgcataatttcggcactgacgccgttatgcaagtacgtgtcggtgggcagatactcgccgaagtcagccatccagccgccgcagccgagttcaatcatgttctttttgatcacttccttgaaccaggcgtaggcttctggattagtgagatcgacaacgccgccgtaaaactcgccaaactccaccagatagtcaccgccagaggcatcttttgccagatagccgtgttgtgccgcttcttcgcagagatctttatcgctggcaacatacgggttgatataggccaggaactgcacgccctcctgattccactgcttaatgcgactatccagttgcgggtagttttcgctgttccacttccagttccacatcacgcgtttgccaaaagaggtcatacgaataccggaccagtcctgcgcccagatgccgttgaccttcacgcccgcgttacgcatggtgtccagtttcttctggcacacttccgtcccgccctgaatgccgagcgttactccgtcataaatccagtcgggcagttctggctggcgtcccagcagggcggttaatttttccagcagggaaatgtatgtgtcagcacattcaaaacgcagcgttgctttgtcttcccacagcgccagttcatggtattccggggcactaaagtcgaagttcatatagcaactgttatcaacatggcagtaatacttctgcgtgctgacaaacgtaggctgtgggaagaaagtccagtaatagtcgccgcccgcattttctttgcagtcggcctgccaggtgacataggtttgtttgttgcgaccaacgccttgttcactggtccatagcgggaacggtttgccacgcagatcgaagtaggaaaactgttcgccgcagccgtagatatggtcctctggttgagcggcaaggcgcagccagatacggttgtggttaaggttgtcgttttgtagttccagcaataaacgcccctgatcgtcggcagagatattcagcgtggcgctaatgtcagaaccacggctgaaatgaattaaccaaccatccggactctggctgacgatggcgtcggtaagcgcaattttctcctgtagtttatctttaatgctgaaattaccgcggaacatatcgatatccgctataccactgccaatccataaacaaggattatctttgctatgggttaaaataagacgttgttgaaaatgtagggtaaaactgtcgttattctgatgaaattgaaaatctaataactgtggacgtggcgtatccataactaatctccatagagttgagaacgagattgttgccttcctgttattacaggcttatgtaaaatgattctcataaaactgatatataaaaactttacagaagctgagctgtttttaacttaataaattgaagatacataatgttgcctttagcgagtgaaatgttcttcaatgattttgactgctaatcaatacaagttattttctctgtccgtaaatattaaaaaacaggcggtgcggttttccactttccagtaataataagtcgataccactattaaaggcgttaggcgggcaactcataggttcaactgccagtccctgacgctgtaatttttcaccgctataaacctgcacccagagttgatcggaacaaaggcttacgctaagcgcctgctgtggatgggtaatggtcatttcccacaaatcattagcggttttaaaggtgtggtcgatttttgtcgcggctatttttttcgcctgcgtgaaatttaaatccagctcatcaacgtggtgaagcgttgtcggattcgcgtgctcatcgacggcataaacctggtttgccggaagctggaacagatattcatcaacagatgttaagttgcaggttaaataaggatgaatacccacgccataaggcgctgcgacagtgccgatattctggcttgcgatctcaacggaaagacccgtgtgtgcgttgaggctataaacaacttgactagccagcataaacggatagccgtaactgggcggcagaaaagctgtcagggtaacgctggtggcggttaattcactaatttgccagtctcgccaggcaagcagcccgtgaatagcggctttactactatgttcattaatgggtaactgatattcctgcccctgatagcggtaacagccgttggcgatccggttcggccacggaataagcactttacccagatgcgccagcggcatctcttcgggtttgtgcgggatgactaaatgacaaccctgaaaggttaattcagccagaccagcaccgacggtcacaatggtcgcgtgataatcccccgcggcaagactaacggtctgtccactgcaatgcatattggtgatttgcatacaaggcaccttaattaagctcatacagcctcccgtgaggctgatgtcaaacccaaaaactgcaccggacggtcccctcgcccctttggggagagggttagggagaggggaaaacccgcaccctattttcagatcagttatttcgcattaatatccagcagacccgctgcaaccgctggagccatgccgggcgctaacgggatacgcgggatcaccaggcaatgcagcaggtgataaatatcctgtttgccgtcccagactttggtggtgaccttattgtccgcatccagctcctgccaccaggaaccattttcatagtccatcaggtacttaatgcagtactcccaccatgtttgataccaggtttcatactggcgatcgccagtgacggtgtagagcgcgtaggccgtacccattgcttcgacgataggccaacgtacacgttcgcggaccaccggttttccttcccagtcaacggtataaacaatcccgtccgcgccatcgggtgcccaggcatcgcgcacggtggcgttaaacagacctttggcatcttctagcagccatgctggtggttgttcgcaacgggcttccagggcagcatggatgtgcagcattaaacggccccattcgatccagtggcctggtgtacctccgaacgcgcggaagcgatgcgccgggttatctttgttgtaatccggcagcggattccactgggtatcgaagtgttcgttaacgcgataatgattatttctggcgacgtcgtggataatcacggaagccacgcgaatcgcgcgatccagccattttttgtcgtgagtgacgtcataaacaatcaagaaagcttccaccgcgtgcatattggcattgccgccgcggtactcttcggttttgctgaaggcttcgtcccaggattccaggcacatctgctcttcttcgctccagaaatatttctcgataatttcaatggtgtaatcgagcagcttgcgcgcttccgggtgacccgttgtgacggcgctggcggcacccagcagagcaaagaagtgttgatagccctgtttggaggcatccaccacgccctcgtcattcacgcaggcataccagccgccatattttttatcacgcagtgcgccgttcatggctttgataccgtgatcaaccaagctgtaagcgccaggtcgacccatcgccgcagcaacggaataaacgtgcaacatacgagcggtgatccacagatgggtgcccatctcttctttgatttgccctttattgcctaaccagccaaaaccagtcggcactacggaatttttaccaaaatcaaagatgcggtcggtttcctgttccagccaacggttgtggcttagggtgttaaaccatttcattccttttatcctcatcttagcggcgtttagccatcatttcgtcgacgatatcgccaagttgttgtaatttcggtgcgcaaacgtcacgcagcatcagctcgttgtctggtaaaccgacgacgcttgcccagactgcacggcctgccaggaatccgcttgcgcccgccgtcattgccacgcgtacggcacgcgggaacagtttttcgtcgacaccggaagagaggatcacccatggcatattgatatggtcattcagacgttgactagcacagagaagctcttgttgcggacctttgccataaagcggcatttcaactttgtagaggtcagcgccactgtcgcccagctctttggcggcatcgatgatcgcttgttcgcgatcgaatttatcgccacgacgcggtgggcggacgactggctcaatgatgcttaccagaccgtgactgtggcacagttcgttgaactctttcaccatatccagacgttgctgcgcatcttcatcactacgccacagcaccagcagttttaaggctttgccaccgtcttgtttgatctgtagcggattgattttgcggtcaataaccacgctatcgaccggaataccgttgccaggaatgaactcatcggcggcgacaatcatggcgcaacttttggcaatcgcgttttgctcaaccacctggcggtagcagaattgttgatctaccagaatcgcgctggcataagggctgagggcctttgcagcgttaactttgaaatcagttaaaacgctatcggctaccggagcgggtgccccagccgcggcaaacatcatgcgcatggcttcgcgctgatcgaccgccagcatggcaaaaccgccgcttgcgcgcgtaatgtcgttgatggtgtacttattcattcatttattcctttatccagtcgttacatttttactttggcagtcatcccggcactgacacggacctgttccagaatggcggaccagtcctggcgaccgcgacccgctgcgcgcgcctggctataaacctcccgactggcggcccccagcggcattggcacatgcagctggttggcgacatcaagggcgatgccaagatccttatgggcaagatcgatcatgaaggcgggagaaagatctccgctgaggactttgtttggccaggaagtggtgaagtgacctttaccggcggcggtaccgctcatcactttgacggcaacatcgaagggaagattcagggcttcgcacaaaacggcggcttctgcgctaagcgcattgagcgcgatgctcatgtagttgttgatgagcttaacgcggatccccatgcccggaccgccagcgttgatcaactcactgcccatcgccatcaggatcggtgtggcacgttcaacttgttcagcggtgccgccagccagcagtaacagagtaccggtaatggcatttgcagaagtacggcctaccggaacatccatcatgctgaagcctttggcttgcatatcggcaatcaatttatcggtttgcagcggatggatggtggacatatcaatgaccagcgcatcggtagataagccttcgcaaacgccgttttcaccgaacaacacgttgcgcaccagatcgccattcggcaacatggtaatgataaattcggcatctttagcggcctgcgccgggttggcggcgggagtcgcacctttgtctaccagatgccgcacagcttcggcgttcacatcaaagacgcgaagttgatgcccttgctgcaataaattgctcgccattgggctacccatttgtcctaaaccgataaacgcgattgctgccataaccctctcctgaatacagttatgtcactttttgtcatttatgacatgctttgcttgtctgtttttgatcgtatttgtaatttatcgtcaaaaaattgacagccgtcactttttaaacaattggtgaaattaaaatgaacgcatcccaaaatgtttaaggaatgaccatgattcgtgttgcttgtgtaggtataaccgtgatggatcgcatctattacgtggaagggttaccgacggagagcggtaaatacgtggcgagaaattatacggaagttggtggcgggccagcggcgacggcagcggttgcggcggcaaggctgggggcgcaggtcgattttattggtcgcgtaggtgatgacgacacgggcaacagcctgctggcagagctggaatcctggggcgttaacacccgttacaccaaacggtataaccaggcgaaatctagccaatccgccatcatggtggataccaaaggcgagcggataatcattaactaccccagcccggatctgctgcctgacgcagagtggttggaggaaattgatttctctcagtgggatgttgtgctggcagatgtacgctggcacgacggcgctaaaaaagccttcaccctggcccgtcaggcgggtgtgatgaccgttctggacggggacattacgccgcaggatatcagtgagctggtggcattaagcgatcacgcggcctttagtgaaccgggtctggcgcgcttaacgggcgtgaaagagatggccagtgcgctaaaacaggcacaaacgctcacaaatggtcatgtctatgtgacccagggtagcgcaggctgcgactggctggaaaatggtgggcgtcagcatcaaccggccttcaaagttgatgtggtagataccacaggtgcgggtgatgtttttcacggcgctttggcggtggcgctggcaacaagtggggatttagcggagagtgtccgcttcgccagcggtgtagcggcgttaaaatgcacacgtcccggtggacgagccgggatccctgactgtgatcaaacccgatcttttttgagtctttttgtataaaatgccagggtgatggtttttcgaggaattttcatgagccttaccgaactaaccggtaacccgcggcacgaccaactcctcatgctgatcgccgagcgtgggtatatgaatattgatgagctggcaaatctgctggatgtctccacgcagacggtccgccgggatattcgtaaattaagcgagcaaggcctgattacgcgccatcacggtggcgcgggtcgggcttccagcgtcgttaatacggcgttcgagcagcgtgaggttagccaaaccgaggaaaaaaagcgattgccgaagcggtggcagactatattcctgatggtagtacaatatttatcaccattggtacgactgttgagcatgttgcccgggcgttacttaaccataatcatttgcggataatcaccaacagcctgcgtgtggcgcatattctttaccacaacccgcgctttgaagtgatggtgcccggcggtacgttgcgctctcataatagcgggatcattggccctagtgcggcgtcctttgtggctgattttcgtgctgattatctggtaacaagcgttggggcgattgagagcgatggcgcgttgatggagtttgatgtaaacgaagctaacgtggtgaaaacgatgatggcgcacgcgagaaatattctgctggtcgccgatcacactaagtatcatgctagcgcggcggttgaaattggtaacgtggcacaggtcactgcgctctttaccgacgagctgccgcccgctgcgctaaaaagtcgcttacaagacagccaaattgaaatcattcttccccaggaagacgcgtaaatttttgtgaccgttaacctggcttcataccttgccacatagccaaacccatcctttcccgctacagttaatttcttgtggcgcgaaaggaggcaaaaatgctctatatctttgatttaggtaatgtgattgtcgatatcgactttaaccgtgtgctgggagcctggagcgatttaacgcgtattccgctggcaagccttaagaagagttttcatatgggggaggcgtttcatcagcatgagcgtggggaaattagcgacgaagcgttcgcagaggcgctgtgtcatgagatggctctaccgctaagctacgagcagttctctcacggctggcaggcggtgtttgttgcgctgcgcccggaagtgatcgccatcatgcataaactgcgtgagcaggggcatcgcgtggtggtgctttccaataccaaccgcctgcataccaccttctggccggaagaatacccggaaattcgtgatgctgctgaccatatctatctgagccaagatctggggatgcgcaaacctgaagcacgaatttaccagcatgttttgcaggcggaaggttttagtcccagcgatacggtctttttcgacgataacgccgataatatagaaggagccaatcagctgggcattaccagtattctggtgaaagataaaaccaccatcccggactatttcgcgaaggtgttatgctaaaaaccattcaggacaaagccaggcaccgtacccgtccactatgggcctggctaaaactactctggcaacgcattgatgaggacaacatgacaaccctggcaggtaaccttgcctatgtgagcttgctcagtttagtgccgctggttgccgttgtttttgcgcttttcgccgcttttcccatgttttccgacgtcagcattcagttacgtcactttatttttgccaactttctgcctgctactggcgatgttattcagcggtatatcgaacaatttgttgccaattccaacaagatgaccgccgttggggcgtgcgggctgatcgtcaccgcgttattgttgatgtactccatcgatagcgcgttgaataccatctggcgcagtaaacgagcgcgaccaaaaatttacagcttcgccgtgtactggatgattttaacgctggggccgctgctggcaggggccagtctggcgatcagttcctatttgctctccctgcgctgggcgagcgatctcaatactgtcatcgacaacgtgctgcgtatttttccgttgctgttgagctggatctccttctggttgctgtacagcattgttcctaccatccgcgtacctaaccgcgacgcgattgtcggcgcgtttgtcgccgcactcctgttcgaagcaggaaagaaaggtttcgcgctttatatcaccatgttcccgagttatcagctcatttatggtgtgctggcggtgatccccattctctttgtttgggtctactggacatggtgtatcgtcttgcttggcgcggaaattactgtcactctcggggaataccgcaaactaaaacaagcagctgaacaagaagaagacgacgaaccatgattgcattaattcaacgcgtaacccgtgccagcgtcaccgtggagggagaagtgacgggcgaaattggcgcgggacttttggtgttattgggtgtcgaaaaggatgacgacgaacagaaagcaaaccgtctgtgcgagcgtgtgctcggctaccgcatctttagcgatgccgaaggcaagatgaatctcaacgtgcaacaggcgggcggcagtgtgctggtggtttcccagtttaccctcgccgcagataccgaacgggggatgcgcccaagtttctccaaaggtgcaagtccggatcgcgcagaggcgttatatgactatttcgtcgaacgctgccgtcagcaagagatgaacacgcaaacaggacgcttcgctgcggatatgcaggtaagcctggtcaatgatggccccgtgacattctggttgcaggtatgagccagcttccagggttgagtcgggaaacaagagagagtatcgctatgtatcaccttcgggttccacaaacagaagaagaattagagcgttactatcagtttcgctgggaaatgttgcgtaagcccctgcatcaaccaaaaggtagcgaacgcgacgcgtgggatgcgatggcgcatcaccagatggtcgtcgacgagcagggtaatctggtggcggtaggccgactgtatattaatgccgacaatgaagcgtccattcgctttatggccgttcatcccgacgtgcaggacaaagggttaggcacgctgatggcgatgaccctggagagcgtggcgcgtcaggaaggcgttaagcgcgtgacctgtagcgcccgtgaagacgcggtggagtttttcgccaagctggggtttgttaatcagggagaaatcaccacgccaaccaccacgccgattcgccattttttgatgattaagcccgtcgccactctggatgacattctgcatcgcggcgactggtgcgcgcagctgcaacaggcgtggtacgaacatatcccgcttagtgaaaaaatgggcgtgcgcattcagcaatataccgggcaaaaatttatcactaccatgccagaaaccggcaatcagaatccgcaccatacgctgtttgccgggagtttattcagtctggcgacgctcactggttggggacttatctggctgatgctgcgtgaacgccacctcggcggaacgattattcttgcggatgcgcatatccgctacagcaagccgattagcggtaaacctcatgcggtagccgacctcggtgccttaagcggcgatctcgaccgtctggcgcgcggacgaaaagcacgggtgcagatgcaggtcgaaatctttggcgacgagacgccgggtgcagtgtttgaaggcacgtatatcgttctgcccgcgaagccatttggcccgtatgaagagggcgggaacgaagaagagtaactgatggagaggggcggtgctgcctctctcattcaggtcatttatattagtccttggctatttcggttatattaaataagaactctataaatttttattcttcgttggctccatacgtgtcttgctacatcactgttcaggagcatttaaatattatttgtagaactgagtggcaattatcgcagataatgcttaattcatcatcttagttcatgtttgagcgatttttgatagtcaaaaccccctctggtgccatacttttctcataaatatttttaaaatctatagctaacaaatattatgcaaagataatggactagcatcattgtcagtatcattcatttactgctctgtatgttatgaataattatgttgtatgtttgctcttaaaccgtgggaaggaggctataatggttgccaatattaatctcattaaacaagaaagttattctgttgttaatttagaaaaacaactttcccgaactgttaccaacaaaattataacgatgagcaagtaaagaccggttggtggcagtactgaccggtctgtgatgaaagattaatttcaccttaaatcctggtgctgttaggatgctgacgtttttcggctacaccattcagattatgcaaataaatatctctgaatataatatattcatagcacccataattcatcctgggcgataactaaaccatttttgagtaataaatgaaacaactgcaacactcttattatttctggaaaacgcctcgcaaaaacaaaacaacatgcaaaaatccgctttttttaaatgattttccggcgtaattttcgcacatacattaatgagtaatatatgtaaggtattggtaatggcgatgaatacggtttttcttcatttaagtgaagaggcaattaaacggctgaacaagcttcggggctggcgtaaggttagtcgatctgcaattttacgcgaagcggtagagcaatatctggaacgtcagcaattcccggtgcgtaaagcaaagggaggcaggcaaaagggggaggtagttggtgttgatgatcagtgtaaggagcataaggaatgacaaaaatttttcattcttgaatataaaaaacagatgcccttattctggtattaatacaaggctgttttacttgaacttataataactgcaactgttacatcatatctggaaaacgcctcgcaaaaataaaaaatgatgcgtaaatgagctttctttaaagattcggcaagggtacttttctctccatagattcaaaaatgatattggcgagatatttatgaactctctggcaggtatagatatgggcagaattttactcgatttaagcaatgaggtgattaagcaacttgatgatctcgaggtgcagcgtaatcttcctcgtgcggacctattaagggaagcggtagatcaatacctgataaatcaaagccaaacagcaagaaccagtgttcctggcatctggcaagggtgtgaggaagatggtgtcgaatatcagcgtaagctgcgcgaggaatggtaatgggaaaaaatgatgtcaatcagattgctgacaacgtgcgcgttgttcatgccggatgcggcgtgaacgccttatccggcctacaaagtcgtataaattcaatgtattgcagtttattggtaggcctgataagcgcagcgcatcaggcaatcttacgcttgtcatcagtctcatgcccataaccttattgatgtggtggtgggtaaattgaggccaaaccggcactggcggcatagcttgaggtggtaacgcggaatacgagagatggtgtcgtcacaccctatgagctgtaatccgggcgacctgcgccacccggaaaacgtcagagattactctccttcacccggaaacaggaacgggttgatggaactgcgggcatagccttcttgctccattcgtgcgtccagtaccagagaggcgaggtcatctgctacggcttcgatttttggatctttttcctgatagagaattttcaggtaagtgtcgcagtcatcgcagctttcggctttaatcgcggcctgttcgtcatccaggctccagtaatgcagtttgccgctctgctcgcagttgctgcattttacgcgcactacgtgccattcagtttcacacaggttgcagtgcaggtaacgtagcccctgagtggtgccaatttgcaccatgctggacaccggcatagaaccacaaaccgggcaatattgacgttgctcgccgtattcagcgcgggctttgccggggatcagattggccatctgcgcccagtagaggctcagtgcagcccagataaacggcgctttatcgctgctgacggagctgaaatcagaggcaaacagcgcgctggccatatcttccagctcctgagtgcttgccttctccagattctcaatcactgccagcgccgggccgctcatttcaggtttcagctcagcaatcagcgccatcagcagcttttgccagtgcttatcacgcggcagaacgtgaatatccagcgggggcttgccttgtgcgctggcttctttaatgcgcgcagtcagatccatctccagcggatggtcgtacagcaccacttcctgggcgtgggcgataagcgcagcaaagcgcaggtaatcacccagaggattattttctgccagctcgcgcagacgctcggcgcggcggttgtataaattcttgagccgagggaacaataacggcggaatcatatccgccgtacgtttctcgctactacccagctcatcttgcgggattatgcgaatactcattcagctttcttttccgttgtcttgcggacctcacggtaccagcgcgggtgatgtttcttcgcccaggcgctggtaacccatccttccaccatggcggtaatcgtgcctttcacccaaagggcggcgtagatatgcaccatgataaccacaattaacgccactgcggcaaaactatgcagcattaacgcgaatcggatcaccgggatactgaaagcaggcgcaaaataaggacgccagataatcacgccgctcaccagcagcagaaccaggaaaataatcgccgcccagaaaacgcatttctgaccgaagttataacgcccggtgtcacctacttcctcgttgacgacgatcttacgaatattcttcgcccaaaagatatcatcccgattgattaggttgtgatgccagtaacggaaaaacatgatgatgaagctggcaaacataaccacgccgacaaacgggtgcagaattcgcgccagctgcggtgtgcccatgatttgcatcaaccagttgaaggacgggaacaaaaagcccagcccgctcaccgccgccaggatgaagcagaaggcggtgatccagtggttgatacgttccggcgcggtgtagcgcacgatggtgtcacgtcgtttcatttgcgctcctcgtctttctcttcgtgcagattattctcttcctcatccgcacggttcggaccgacacccacgtagtggaagatactggccgcaaaggtagccgcaaagccaacagccgcgagcggtttccagatgcctttccagaatttcacggtttcgctgatttccgggttctccggcaagccatgatacagatttggcttgtcagcatggtgcagcacgtacatgacgtgtgtaccaccgacgcctgccggatcgtacagacccgcattgtcgtaaccgcgggttttcagctcagcaacgcgctcgctcgccagcgttttcatgctctctttcgtaccgaagtgaatcgcgcccgttgggcaggtcttcacgcaggctggttcttgcccaaccaccacgcggtcaacgcacagcgtacatttgtagacgcggttgtcttccgggttgaggcgcggaatgtcgaacggacagcccgcaatgcaataaccgcagccaatgcactgctcggactggaagtcgacgataccgttggcatactgaataattgcaccttccgccgggcacgctttcaggcagcctggatcggaacagtgcatacagccgtctttgcggatcagccattccagtttgtcgttctgctccacttcgctgaagcgcattaccgtccagcttttggcgcttaaatcattggggttgtcgtacaccccaatgttattgccgacggtatcgcgaatgtcgttccactcactacacgccacctgacaggctttacagccgatacaggtggtaacgtcgatgagtttcgccacttcttcctggaagtcccgcgcctgaggcgcgggggtcagaccgttagtcgcggaacgacgaatgatatcttgagattgataagccatatgtcgtctccgttacaccttttccacattcacaaggaaggacttaaactccggcgtctgcgtgttcgcatcaccaacgaatggcgttaaagtattggcaataaagccttttttagctacgccttcatagccccagtgaatcggaataccgatggtatcgatatctttgccgttcgctttcagcgtgcgaatacgtttggtcaccaccgctttggctttgatatagccacggttggaggagactttcacggtatcgccctgggcaatgccaagtttattcgccaggctctccccgatttccacaaactgctctggctgcaaaatcgcgttcaacagcgcgtgtttggtccagtagtggaagtgctcggtcagacgataggtggttccgacatacgggaacttatcggctttacccaatgcttcggcgtcgtctttaaagatacgtgcagccgggttgctgataacgtttggatgcagcgggttagttcccagcggcgtttcaaacggctcgtagtgttccgggaacggaccttccgccatcttatcgagggcaaacagacgccccatgccttcctgctgcatgataaacggcccgacgccgctacccggaggcgctgcgctgtagtccggaatatcccagccggtccacttagtgccgtcccatttcagcaactgacgcttcggatcccacgggttaccctgcggatctgcggaggcgcggttatacagaatgcggcggttaagcggccatgcccatgcccagcccagcgtgttaccgaggccagacggatcggcgttatcacggcgtgccatctggttgccttccggcgtccagctaccggcgaaaatccagcagccacaggaggttgtaccgtcatcgcgcaattgggcgaagctactaagttgttggcctttcttgacgataaccgcaccggttgccggatcggtaatatcggccagcgccttaccgttgctctccatcgccacttcttcactagatggctcatgcggaatggcgtagttccatgtcatgttcagcacctggtccgggttcgcgccaccctgttcggcatacatcttgcgcaagcgcaggaagataccggagaggatctcgccgtcagtcagcgcaatccccggggcgtccgcacctttccagtgccactgtaaccagcgaccactgttaacgatagaaccgttctcttccgcgaagcaggtgcttggcagacggaacacttcggtctggatcttgctgctgtcaacttcgttcagctcaccgtggttctgccagaagttagaggtttcagtgttcagtgggtcgatggtgacgaggaacttcagtttgctcagacaaccgatcactttgtttttgttcgggaaactggcaacagggttaaagccctggcagatatagccattgaccttgccctctttcatcatctcgaagtattgcaggacgtcgtagcctttatcccacttcggcaaccagtcaaagccccagctattttccgccgtcgctttatcaccaaagaaggccttcatcatagagacgaagaatttcgggtagttgccccagtagtttacctggccttccagcagcggttttggcgtgttggcggtaaggtaggtttgcagatcggtctgcttctcgcttggcagcgtcatgtaacctggcaggctctggctcagcagccccaggtccgtcagcccctgaatattggagtgaccgcgcagggcgttaacgccgccgcctgccatccccatattgccgagcagcagctggatcatcgccatcgtacgaatgttttgcgcaccaacggagtgttgcgtccagccgagggcatacaggaagctggcagttttatcgtgagcactggtttctgcgatgtattcgcagactttcaggaacgcgtcttttggcgtaccacagatgttttcaaccacatctggcgtgtagcgggaaacgtgctgtttcagcaagttccacacgcagcgcggatgttgcagcgtggtatcgcgtttggcgaagccgttttcgtccagttcataagtccaggaggatttatcgtacttgcgtttttccgcgtcgtagccggtgaacaggccatcttcaaagccgtaatcctcacgcacgatcaggctggcgttggtataggcttcggtgtattcgcggttgaatttttcattgttcagcaggtacagcaatacgccactcaggaaagcaatgtcagtaccggaacgaataggggcatagtagtcagctaccgccgccgtacgcgtaaagcgaggatcgatcacaatcagcttcgcgccgttgtgaattttggcttccatcgcccagcggaacccgaccgggtgagcttcagcggcgttaccgcccatcaccacgacgaggttggcgttcttgatgtcgacccagtggttggtcatcgcaccgcgaccaaatgttggagcaagacttgctaccgttggtccgtgtcagacacgcgcctggttgtcgaccgcgagcatacccagcgcgcgggagaatttttgcgttaaatagccggtttcgttactgctcgcggaagcacacagcatcccggtggagagccagcggttaacagtcacgccttcggcgttttgcgcaatgtagttagcatcgcggtcttctttcatcagtttggcgatgcgatcaaacgcctcttcccaactgatttgctgccatttatcagaacctggcgcacggtattccggaaacttcagacggctttcggagtggatgaaatccaccaggccagcgcctttcggacaaagtgcaccgcggttgaccgggtgatccggatcgccttcgatatggaagatagatgctttggcgttttttgctccgtcaccgaggctgtacatcaacagcccacagcctacggaacaataggtgcaggtattacgggtttcgcgggtgcgcagcagtttatactgccgggtttccgcgagtgctacgctgggtgcaaaacccagtgccgctgccgtggtgcctgccataccgccagcgcagatcttaaagaactgccttctgctgacctgcatggattgctccttgtttcgacattgtcacgtcccatttacattcgcttgctgcgtgtgcagggagtgggagttatttttctttgcggaaggggccgcaaaggtccagaattggctcaatttccctccatccaggaagggtttgtaacagaataccataatgttggtgtgtgtgttcttatctggttaagagaaagtgaaaaaaacacagcgaaaagaaatcgaaaatgtgacaaatatcacaggtgttcgtcaaattgagttatggcggcgtgatgatttacaacacccacggttagatgaggtcgcggaagaagttcccgttgcgctggtctacaacggcattagccatgtggtgatgatggcgagccccaaagaccttgagtactttgcgctcggttttagcctttccgaggggattatcgaaagtccgcgcgatatcttcggcatggatgtcgttccttcctgtaatggtcttgaagtacaaattgagctttccagccgccgctttatggggttgaaggagcgccgccgggcgctggcgggacgtacgggctgtggcgtatgcggcgtggagcaacttaatgacatcggaaaaccggtgcagccgctaccgttcacccagacgtttgatctcaacaaactggatgatgcattacgtcatctcaacgattttcagccagtggggcaactgactggttgtactcacgccgctgcctggatgttgccatctggcgaactggtcggcgggcatgaagacgtgggtcgccatgtggcgctggacaaactgttaggccgccggagtcaagaaggggaaagctggcagcaaggtgcggtactggtttccagtcgtgccagttatgaaatggtgcaaaagagcgcgatgtgcggcgtagagattttgtttgcggtgtctgccgcgaccacgcttgctgtagaagtggctgagcgctgtaatctgacactggtaggtttttgtaaaccgggtcgggcaacggtttatacccatccgcagcgtttgagcaattaattaaaataagtcctgcgaaatatattaaattgcaggacttattcatttcgtgaattttattattttatttataaacaaaatgcgtgtagtggcgttttcttttttcatttattatgttcactctcttatctatatatttataaggcaattaaatgaaaaggaatttattatcttccgctattatagtcgccatcatgtccctcggtctgacgggttgtgatgataaaaaagccgaaacagaaacgctcccgcctgccaatagtcaacctgccgcaccagctcctgaagcgaaacctactgaagctcccgttgcaaaagcagaagctaaacctgaaacacctgcgcaaccggtggtcgatgaacaagcggttttcgacgaaaaaatggatgtctatatcaagtgctacaacaagttacagatcccggtacagcgcagtctggcgcgttatgctgactggctgaaagattttaaacaggggcctaccggtgaagagcgtactgtttatggcatctacggcattagtgaatccaacctcgctgagtgtgaaaaaggcgtaaaaagtgctgtggcgttaacgcctgcgctgcaaccaattgatggcgtggcggtgagttatatcgatgctgccgtggcgttgggtaataccattaacgaaatggataaatattacacccaggaaaattataaagacgatgcgtttgcgaaagggaaaacgctgcaccagacattcttaaaaaatctggaagcctttgaacctgtagccgaatcttatcatgcggcgattcaggaaattaatgataagcgtcagcttgcggaactgaaaaatattgaagaaagagaagggaaaacattccactactactctctggcagtcatgattagtgcgaaacaaattaataacctgataagccaagataagtttgatgcagaagcggcaatgaagaaagtgtctgaactggaaacgctagtggcgcaggccaaagaagcggataaaggcggcatgaatttcagctttattaatagcgcaggccagtatcaactcgaggctaaaaaatacgttcgccgcatcagagataaagtcccgtactctgactgggataaagagcaacttcaggacgcaaacagtagctggatggtcgaagactctttcccgagagcattacgcgagtacaacgaaatggttgatgactataatagcctgcgttaaacgtttttgatgataaatgcagtgtcggatgcggcgcatccgacacagttcaccccttgtgaagtaactccataaatgcctcatatcctgttaacccggcaataatctccgccggatgctgacacaatatgcttgccagatagctaaatatttttagctcatgacgcgcatcggcggcggcgcaggcgatcaagacatggttaatgacttcgttattcacctcaactggttgggcgagggtaataaaaaatccacgaaaacgtcgctcctgttcgctccagcaatgtgggatggcgaggcgattaacaatcaggttttcaccttcgccttcgcgggcgatgatgcgttgtgcttcatcggcggtaatatggtgttgtgcgactaattgcgcacaaatttgccgggtaatatgttgccagctttcaccgcgtacattgctataatgaaaacttccgggggcagagaaaaaacgctccggctgttggcgaataaatgccgtcgccagaaaatgttttatttgttcgataccggcagccgtaatgatattttttacggtgatgtaattatttaccgcgtcatccagtaaataatggctgttgttaatgatcaataacggctcaatctcttcgcgaatggcaacaagttcgcttaagctacgggcaataattacccgacaatttaaaacatcgcgctcaatggcgagctgattaatagtggcaatcgcgttctggtcgctgagcaaaatgatcggctggcgttcgttttgatgccgctccagcgcacaggcaaaatacaaaccgatcagatcgctgtcgaaaaggggaatatcgagctgttcacgcagtagcgtaataaagtgcagactcatatcaaaggccgcaggccaggcggctttcaggttattcatgctgctctggcggtgctcagcaatccacactggtgcggcaaggcaacgtaataaatgcccggtaatattctcaaccagctgcgcatcaataatattcaaactcgcgatgcccggcaccctttgcagcaacccctgcacattatcggcactaattacctgcgcttgctgatgctgtttctctatcaaacccgtcagggttcttacagcgttatcaccaagaaacagaccgctatgttcaacgatttgttttatctcgtcaccgggatattgcggccactcatcggtcagttgattacgcagggcgtaaatcgccagaatcaggctggagagataatcaccctgcatgagcggccagcggtgttggttgtcgcaggccgtggataaatgctgaaggttgtctcgtgttatgcccgccagcggaattaaaaacggatctttgcgcagcaagttcgccagcaagataacgcgtttctcttctgtctcatcaatgaaatggcccaaaccagggcggctggccaggcaacaagtgcgttcataacgctgttttaaccggggcagacgctctgctacccacgtttctggcaaattaagcgcgctggcgagttgcgcacggggagtgaaagtattcagtaataacagcgccagcagccgatcgtcgttatcgtgcttttgcagcaactgaaaaaagctgcggcgctcgaagatttccagctgatagcccgcactgccactggcgaaaatgcgggctttgccgttaagggtgaagttgagatagtcaatatcacgcaggatggtcctgccactaacgccagtctgttgcgccagctcgccaggcgtgcgcggctgttgctccagcagatcgacaatctttaactggcgttcgtttagcattaatccacctgacggaactggctaaacgcgttgactttctccgcagttaaggtcgtcagaaaaccccgtatcagcgtgagcagagcttcgtaatcggctttactaatcataccgctgttggcgtgcagataacgagttggcagacacagcgcgacaaccggacgcccgccgcccatcacgttgtagcgcccgccatccgtcgcaccggttttcatggtggaaaattgcagcggtaaatcgttatgtgcggcacagctttttaacgctgctaccagtttctggttggggaagtagcgcttgtcaaacagcatcagccccggcccctggcccagtttcagcgggtatttaatgttatcaatgcccggaacatcgcccgctacggcggtatccaacacgatcacgacgtccggtttaatgtgttccgcgctggtttgcgccccgcgtagcccaacttcttcttccacactgccaacgccatacagcgtaatttcgggattattcaccgtctgcaatagttcagccatcattgcgcagccgatgcggttatccaacgccttgccgaccactttatcttcgccccagcaggcaaaattggcttccgggctaataaaattaccaatttccacgccgcgcttttccacctcttcgcgactgttcgcgccaatatcaatgaacatctcatcaaaactcagcggttgttgcttttgcttttccgttaacgcatgaggcgcgacggaaccaatcacaccagggattttcactcccttgtgtgtgcgtatggttacccggtggttgagcatgctctgattccaccagccgccaatggtggtaaaacgcagaaaaccgctctcgtcgatgtgggtgaccataaagccgacttcatccatatgtccgacaacggcaacttttggacctttattccccttacgggcaacaaagctgcccagaccatcgaaggtgatttcattcacgcaaggttccagcgtgtttatcagaatgtcgcgaacttcctgttcatcgccgctgacggcgctggcttcgcacaactgttgcagtaactcaatgttcatggacaagctcctgttgcgcggctttcgctttgcggcgtaaccacaatcctttcaggacgataatgaaactaatgttcagcgcgaggccaatcgccagcaccagataaaagctacccaccgggctcatcaggccgatcagcgggtcaaagatacccaaaccaggtgccagacgtttgattccgaaagcgatcaccagcacgccggtaatgccgcccgccagcgtattggcggtaatcatcggcaacggagctgccagagcgtaaggaatagccggttcggttgcgactgtggcaccgaccacaatggcactactggcagcctctttttcctgtcgggtaaacagtttgggcgcaatgaacgtcgcaagacccgccgcgacgggcggcatcagcgcgacaacgccgacgatggcgtaccagtcataaatgtgtttttccagcagactgaagcagaagaaccaggcggttttattgatggggccgcccatatcgaacgccagcatcgcaccgaccagaaacgctgccgcaaacttcatacttggaggaatggtattcaggaagtggagcagcccgcccatgaggtcggacatcaccggcccgataacgtagtaagtgagcacgccgaaaaccagcagagtaacgaacgggatcagcatactaccgagcagcggttgtaatgctttgccaaggcgcactttgcggaaccagaagacgaaatagccaatcgccagccccagcaccaccgcgccgaggaatcccgcaccgctctgggtgccgagcagcgctttgtcgttcgccagatagcaaaccagaaacgccggagcgaaagccggtttatcggcaatgctgctggcaatataagcgcccatgatggggatcataaaggtgaagccaaggtaaccgatggattcaactacccaggtaaagctcggcgcgcctttgctcatatcggtatacggcaaaccgaactgcaccagcatgttggcaagcgccaccaggataccaccgccgatgacaaacggcagcgccgcagagacgcccgccatcaggtggctcatcacgctaccgctttgcacttcctgtttgccaagcttcacgccgctatctgcggcaaaaagctggctgtttgtcggtaattcgctgaaaatctggtcgatatttttcaacgcctgggagatggcaatctcataaactttcttcccggcaaaccgcgcgcgatcatcaccgctcaggccacgcccggtagcgagaatgacgtaatcggcagcggcaatctcttcgctggataagcggttttcaacgccactggacccttgagtttccacttttatggtatgaccgagagaacgggctttctgttccagggcttccgccaccatgtaggtgtgagcgatcccggcggggcagttggtgatcgcgacaatacgtaaggaactctccatcgccacttccttaactgctgagggtttgatttaacaaggcaagcacctggtcggtatcgccctgttgcagttgatgaataaattccttgtgaataattttgcgacacagtgtgccgatgattttgacctgatcctcttcgccgctttgcggcacgccgaggcagatccagcaattgacgtcttcgccatcgctggctttccagtcaatagcctgcgctttgcgggcgaataatacgaacggttgtttaacgcaggcgcttttaccgtgcggcacggcgacaccggaaccaaatccagtagagtgcattttttcgcgcagcagcagggtttgcaggaactggtgactgtcggtgataaaaccgttttgtaacgctattgtcgccaactgcttcagaacggaataagcgccattgccctgaatattcaggtcaatacagcttgcagtaagagctgccattaatcggactccataaaatatattttaatcaattgtaatggtggagcgattaagtgatgagaggcgatatgtcggtaaacaatgacaatttgagacagagtgaaaggtcagatttgcggagtaatgcacataatggttatttaaataaaccacatgaatcattaatgggttattcattatttttgtgatttactcacaatgtatcagggaaatataacttaccgggagatgtaatatgtttaatttttcaaatcgaaatttaaaatattgtgccggaggcatctctggcacattgggcaattacggcaggtaaaacacttcttgcagctcgctactcaccgggctgttatccgggttagcgggcataacatcggtcatatatttccaccaacgttggcagacatcagtgctggcaaccgcattccagcgttcttcagattcaatctctaccatggcaaacagcagattacgcgctttgtcgagatagatggcgtagttatgcgcaccgtgagatttcagcactgcttccagttctggccagatgggattatgccgacgctgatactcttcgtgggcgtcggggtttacctgcatgacaaaggctttgcggatcatgtttgctccttacagcgccagcgcactggcgagtggcgtaacgccgaaacgcttgccgagcgctatcaactcttcacggctgatggtctgtttcatgccgcccatgctataaaccttcactaatacttgtgcacttttttctgcggtgtcgattaaaccgaaggtttcatccagcgtcggtccgctgccgaagacgccgtggaagggccacaacaccaggctatgtttttgcatctcttgtgcggtcgcctggccgatttcgtccgtgccgggcaccatccacggcaaaatgccaacgccatccgggaataccaccagacactcggtgctgccttcccccagttggcgagtgaagaccgcggtgtcgttttcaagtacataggtgagggcgatcaggttggtggcgtggcagtgcatgatcacccgatctttgccgttggtggctttaatgcgctcgcagtgggaaaggaagtgagccggaagttcggaagtggggacggcttcgttggttaacccccaaagaatgtggtagcccgcgccgtcgctgtcgacttttacgatgcctaagttagccgcaggatcaagctggacgttacggaagaatttgccgctgccggtgacaataaacggtgtatttgccagtaaaggcatgggctggctgagcgggatatagcgcggttgttggtggaaattgtcgtgatatggtgcgatatcggcgtcatccaggcgtagcgtcaggttgccgccgttgcgctcatcccagcctttcagccaggcgtcggtggtggctttgatcattccctggacaaaccaggactgagtaatgttttgcatgttctgtgttcctgtaaattcggtgttgtcggatgcacgacccgtaggccggataaggcgctcgcgccgcatccggcaatcaatgcctgatgcgacgctgtcgcgtcttatcaggcctacaactattgccgacctgtaggcctgataaggcacttgtgccgcatccggcaatcaatgcctgatgcgacgctgtcgcgtcttatcaggcctacaactgttgccgacctgtaggccggataaggcacttgtgccgcatccggcaatcaatgcctgatgcgacgctgtcgcgtcttatcaggcctacaactattgccgacctgtaggccggataaggcacttgtgccgcatccggcaatcaatgcctgatgcgacgctgtcgcgtcttatcaggcctacaactgttgccgacccgtaggccggataaggcgctcgcgccgcatccggcagtgtttacccgcggcgactcaaaatttctttctcataagcccgcacgctctccagccattcgctacctgctggcgtatcgtgacgttggcaatacatttcccagaccgcctgccacggcaagcttttctgctcttccagcagtgccagacgcgcagtgtaatcgcccgccgcttccagcttgcgcagctcagcggtaggttccagcaacgcacgcagcagggcttttttcatattgcgtgtaccaatgacccacgcggcaatgcggttgatagaggcatcgaagaagtcaaggccgatatgcacccggtcaaacagatcgtgacgcacaatctcactggcaattgcctgggtttcatcatccagcagcactacgtgatcgctgtcccagcgaaccggacggctgacgtgcagcagcaactgcggcacatacagcatggcggcggaaatcttgtcggaaatcacttcagtcgggtggaagtgcccggcgtccaggcacagcgcagtctggcggctggtggcataccccatgtaaaactcattggagccaaccgtgtagctctctgcgccaatgccaaacaatttgctctcaacggcgtcgatatggtgcgcagggtttagcttctcgctgatcacctcatccagtgctgccagcagacgctgacgcggggcgagacggtcaacggtgatatctttcataccatccgggatccagatgttcatcacgcttggtgtgccgagttgctcgccaaaataggcgctaacgcgacggctggctttgcagtgatcaatccagaactggcgaatgctgtcgtcggcatgggaaagcgtaaagccatcggcgcttagcggatggctaaagcaggaggggttaaaatccagaccgagctgattggctttcgcccattcaacccagtttttgaagtgctctggtttgatctggtcgcggctgactggcgtatcactttccagatagatggcatgtaaattaagccgtttcggccccggaatcagccgcatagcctgttccagatcggcacgtagctcactggcattacgcgctttgcccggataattgcctgtggcctgaatccccccggtcaggctaccttccgggttttcaaaaccggaaacatcatcgccctgccagcagtgcatactaacgggtaaacgatcaagttggcgcagcgcctcctcgacatcaatccccaccgccgcgaaacgctgtttcgctagctcccaggcctgttccagttgagtggtcatgcgcaaagctcctttgtctgtcgtgtagagtgaatctgcgccacatagtgggcaatttcactgtcaggattaggggtaaaggtggtcagattcgcggtggtgctgacgacctgacggaaatcatccacattgttgagttcatccagcgtcattaactggatgccgatattgccgagcgtgctggcttcaacaggcccggcgatcacccgaataccgcaggcatcggcgcatagctggttgagcagcgtgttctggcagcctccgccgacaatatgcagttggctgaaatcttcaccgcgcagctgcgccagctcatgcaacacatcggcatacagcagcgccagactgtcgaaaatgcagcgcgccagttcagcatcactttccgggatcggttgcgccgtttcccgacacgcagcctgaatttcgctgcacatcgtctcaggattaataaagcgatcgtcattgggattgataatgaagcggcaagccggaagtgcctgtgtcgcggagataagcgccggaagatcgttgatttgctgctcctgaagcactcgctgaagcagccataagcccataatatttttcagcacccgatagcgaccttccgccccgccttcattggtgatgttggctgccagtgccgtgtcattggtaaatggcgtctggctttcgaagcccatcaaactccaggtgccagaagagagataagcagcacgactgccgtttaacgggctggcgataaccgcgctggcggtatcatggctggcaacggcgaccactggaatctcattaccctgcgggcaaatccagtgacctatgacattacccggatgcgtcgggcgaccaaaccaggctttgttggccccgctccacgccagtaggctctcgtcccagtcgtcgctattgatattgaccagttgcgtggtcgtggcgttggtatattcccagttcatcttgccggtcaggcgataactgaagtaatccggcatcagcagagcgtgagcaatgtgtggaataagttcaggttgttgctccgtcagcgcacgcaactgataaagcgtattgaagggcagaaactggatgccgctacgttgataaatatcgcgtttgccgagttgttgttgtgcctgcgccattaggccattggtgcggctatcgcgataagcaacgggcaggcccacacgctgaccctgttggtcgagcagcacaaagtccacgccccaggtatcaatcccaatgctatcgatacgaatcccttcctcgcacaccttgtttaatccaaggcgaatggcactttcaaggctatccacatcccaggtgacatagccgttctgactatgcagcccattgttaaaacgatggatttcgcgcagcgtcaggctgcggcattcacgctcgtaacgcgccagcatcacgcgcccactggatgcgccgagatcgacggcgacacaattgcgaaaggtcataatgtgatcctgctgaatttcattacgaccagtctaaaaagcgcctgaattcgcgaccttctcgttactgacaggaaaatgggccattggcaaccagggaaagatgaacgtgatgatgttcacaatttgctgaattgtggtgatgtgatgctcaccgcatttcctgaaaattcacgctgtatcttgaaaaatcgacgttttttacgtggttttccgtcgaaaatttaaggtaagaacctgacctcgtgattactatttcgccgtgttgacgacatcaggaggccagtatgaccgtattacatagtgtggatttttttccgtctggtaacgcgtccgtggcgatagaaccccggctcccgcaggcggattttcctgaacatcatcatgattttcatgaaattgtgattgtcgaacatggcacgggtattcatgtgtttaatgggcagccctataccatcaccggtggcacggtctgtttcgtacgcgatcatgatcggcatctgtatgaacataccgataatctgtgtctgaccaatgtgctgtatcgcagcccggatcgatttcagtttctcgccgggctgaatcagttgctgccacaagagctggatgggcagtatccgtctcactggcgcgttaaccacagcgtattgcagcaggtgcgacagctggttgcacagatggaacagcaggaaggggaaaatgatttacccagcaccgccagtcgcgagatcttgtttatgcaattactgctcttgctgcgtaaaagcagtttgcaggagaacctggaaaacagcgcaagtcgtctcaacttgcttctggcctggctggaggaccattttgccgatgaggtgaattgggatgccgtggcggatcaattttctcttagtctgcgtacgctacatcggcagcttaagcagcaaacgggactgacgcctcagcgatacctgaaccgcctgcgactgatgaaagcccgacatctgctacgccacagcgaggccagcgttactgacatcgcctatcgctgtggattcagcgacagtaaccactttagcacgctttttcgccgagagtttaactggagtccgcgtgatattcgccagggacgggatggctttctgcaataacgcgaatcttctcaacgtatttgtacgccatattgcgaataatcaacttcgttctctggccgaggtagccacggtggcgcatcagttaaaacttctcaaagatgatttttttgccagcgaccagcaggcagtcgctgtggctgaccgttatccgcaagatgtctttgctgaacatacacatgatttttgtgagctggtgattgtctggcgcggtaatggcctgcatgtactcaacgatcgcccttatcgcattacccgtggcgatctcttttacattcatgctgacgataaacactcctacgcttccgttaacgatctggttttgcagaatattatttattgcccggagcgtctgaagctgaatcttgactggcagggggcgattccgggatttaacgccagcgcagggcaaccacactggcgcttaggtagcatggggatggcgcaggcgcggcaggttatcggtcagcttgagcatgaaagtagtcagcatgtgccgtttgctaacgaaatggctgagttgctgttcgggcagttggtgatgttgctgaatcgccatcgttacaccagtgatagcttgccgccaacatccagcgaaacgttgctggataagctgattacccggctggcggctagcctgaaaagtccctttgcgctggataaattttgtgatgaggcaagctgcagtgagcgcgttttgcgtcagcaatttcgccagcagactggaatgaccatcaatcaatatctgcgacaggtcagagtgtgtcatgcgcaatatcttctccagcatagccgcctgttaatcagtgatattagcaccgaatgtggctttgaagatagtaactattttagcgtggtgtttacccgggaaaccgggatgacgcccagccagtggcgtcatctcaatagccagaaagattaattcgccatgccgatgccgacgatgttagcggcgacaataatcaccacacaaccgaggctcaacaccgttaccggacggcgtcctgcattgttccactctttcagcaccagcccgacgataccgccgcacaatacatagaaactcatatgcagcatccaactgatgtagtcatactgcgccggaatgcgggcgtggccccaggcatagaaaaagaattgcagataccacatcaacccgcccagtgtgctgagtaacacattgtgaatgatcaggctttttgccaggctgaagtcggcttttaggctcaaatccttcacttttgccagacgaataaaacagaaaccgaggttaatgatcgcgccgccgcccatgatgacaacatagcttggcagagcgacatacagtggatcgacgccaagtgcggcagcggcttcatgcatcggttttgcggcgttcatcgcaaaggacatcccggcagagaaaatgccgcacatcaccgccagcaccagcccttttttcagattgaactcttcggctttaatgcccatcttgcgctctttcaactgcccggcgcgagttacaatccctacgccaatcagcgccaccagaacgccgagcaacgtcatgcgtccgccttcggtgctaatcaacacatcgaaattgccgttgataattggcgtcatcagcgtaccgacaatcaacgtaatgccaatggcgatgccaattcccatgctcatgccgagataacgcatggtcaggccgtagttgatattaccgatcccccacatagcgccgaacagaaaaacaggcagtcgcgtagagagactaaagctgctgtaatacgcccagaaattcggtagtaacagggcgctgatggcccacggcagaataatccagctaacaatcccaccgacactccacatggtttcccaactccatttttttacttttttgaacggagcgtaaaaacaggctgcactggccgcgccgatcaaatgccaaaatatccccatcgtaatcgcgttactcatcttcttatcctcatcatttttcgtcgcgtcacatctccgacgagatgagtgtaaaaatcgtgctgtcgattaacctttcgcctgttgccgccgttgtcgatttactggcaatcacggcattaagtgggtgatttgcttcacatctcgggcattttcctgcaaaaccatacccttacgaaaagtacggcattgataatcattttcaatatcatttaattaactataatgaaccaactgcttacgcggcattaacaatcggccgcccgacaatactggagatgaatatgagctataccctgccatccctgccgtatgcttacgatgccctggaaccgcacttcgataagcagaccatggaaatccaccacaccaaacaccatcagacctacgtaaacaacgccaacgcggcgctggaaagcctgccagaatttgccaacctgccggttgaagagctgatcaccaaactggaccagctgccagcagacaagaaaaccgtactgcgcaacaacgctggcggtcacgctaaccacagcctgttctggaaaggtctgaaaaaaggcaccaccctgcagggtgacctgaaagcggctatcgaacgtgacttcggctccgttgataacttcaaagcagaatttgaaaaagcggcagcttcccgctttggttccggctgggcatggctggtgctgaaaggcgataaactggcggtggtttctactgctaaccaggattctccgctgatgggtgaagctatttctggcgcttccggcttcccgattatgggcctggatgtgtgggaacatgcttactacctgaaattccagaaccgccgtccggactacattaaagagttctggaacgtggtgaactgggacgaagcagcggcacgttttgcggcgaaaaaataatcatttgccgcctgctgcaatgaggcgtataggccgcatatcagcttaaaaaatgaaccatcgccaacggcggtggtttttttgtgatcaatttcaaaataaaaacaatgatccgataaaaataaaacagcgtttcaattgatgtggttttgatcacttttattgattaaatgaatgtctatcttcgtttccatcaacactgatgctccattgaggaattacgcatcagcccttaaaaatatgccgacaggtgatggaaatgcagataaaacgcagcattgagaaaatcccggggggggatgatgctcgtcccgctattccttggcgcactgtgccacaccttcagcccgggggcggggaaatattttggaagtttcaccaacgggatgattaccggtacggtgcccattctggcggtgtggtttttttgcatgggggcgagtataaaattaagcgcgacgggaacggtactgcgtaaatccggtacgctggtggtaactaaaattgccgtcgcgtgggtggttgcggcaattgccagccgtattattccggaacatggtgttgaagttggattctttgccggacttagtacgctggcgctggtggcggcgatggatatgaccaatggcggactttacgcttccatcatgcagcagtacggcacaaaagaagaagctggggcatttgtgttgatgagcttggagtccgggccgctcatgacgatgattattctgggcactgccgggattgccagctttgaaccgcatgttttcgtcggcgcagtattaccgttcctggtgggctttgccctggggaaccttgaccctgaattgcgagaatttttcagcaaagcggtgcaaacgctgattccattctttgccttcgcgctgggcaataccattgatttgactgtgattgcccagactggtttgctggggatcctgttgggtgtggcagtaattatcgtgaccggtattccgttgattatcgccgataaattgattggcggtggcgatggcactgccggaattgccgcttccagttccgcaggggccgcggtagcgacacctgtgctgattgcagaaatggtgcctgcgtttaaaccgatggctccggcagcaactagcctggtagcgacggcggtcattgtgactagcattctggtgccaattcttacctctatctggagtcgtaaagtcaaagccagagcagcgaaaatcgaaattttaggtacggtgaaataaacctgcttccttaatccccacagccggatgaactaacgttcgtccggtttgctattgagttcctgcctggatacttaccgcgaaaacagcacgcctgacataaaataaatatggtctaatggggaaatttctcgtggagagggaacagatgcgatatccggttgatgtatacacaggcaagattcaggcttatcccgaaggcaaacccagcgcaattgctaaaatccaggttgatggtgagttgatgctgacggagctggggctggaaggtgacgagcaggcggagaaaaaggttcacggcgggccagacagagcgctgtgtcattatcctcgtgagcattatctctactgggcgcgggaatttccggaacaggcggagttgtttgttgcgcctgcgtttggtgaaaacctcagtaccgacggcctgacggaaagtaatgtttatatgggcgatattttccgctggggagaggcattaattcaggtcagccagccgcgcagcccttgctataaactcaattaccattttgatatcagcgatatagcgcagttgatgcaaaacacaggtaaggtggggtggttgtatagcgtgatagcgccagggaaagtgtctgcggacgcgccgctggagttggtttcccgtgtcagcgatgtgaccgtgcaggaggctgccgccatcgcatggcatatgccgtttgatgacgatcaatatcaccgtttactctccgctgccgggttaagcaaaagctggacgcggacgatgcaaaagcgccgactgagcggcaagatcgaagatttttcccgccggttgtggggaaaataacccccggagtgtaggcctgataagacgctatcagcgtcgcatcaggcatcctgctcaaatgccggatgcggcgtaaacgccttatcctgcctgcaaatgcgaagtttaactccgcttatacagcggcaaccaaatcaccagccgtaaaccgcccagcgggctgtcttctgccttcacccagccacgatgctgctgaatggcggtttcaacaatcgccagccccaaacctgtaccgccagattcacgatcgcgtgcttcatcggtacgatagaacggacggaaaatctgttcgcgatcttccgggctaacgccaggaccatcgtcgtccaccgtaatggtgataccgtctttatctaccgcaaagcccacttcaatcttcgtatgggaataacgcagagcattacgaacaatgttttccagcgcactttccagggcgttcggattgccgtacagcggccacggcccaggcgggaagttaactgtcaagctcttgcccatttgctcggcttcgaacgccgcgttatccagcacttcactccacaactggttggctttgatggtttcgctaaccagcgcgtttttttgctgattacgactcatcaccaacagatcgttgatcatgctgtccagacgttgcgcttcggtttcaatacgctccagttccttgctttcaccgctacgacggcgcagtaacgccgtacccagttgcagacgcgtcagcggggtgcgcagctcgtgagagatatcagaaagcagacgctgctgagaggtcatcatgcgctccagcgcggtgaccatctggttaaaactggcacctgcggcaaggaattcctgtggccccgcttccagttccgggtgctggcgtaagtttccctgggcaacttcatcggcagcgtttttcagcttacgcgccggttttgccagactccaggccaaccacaacagcagcggcgtactgaccaacatggtgacaatcagcagtaatagcgggcggtcaaacagtaagttaatgaaatcggattgagaactgctggccggacgaatcagataaagttggtaattatcttcgccatcacgcacggagaacggaccgaccagttccacgcggccatactttttcttctgcggatgatcggcgttatcggcctgaccaataaagttacgaatgatctgcatttcgctgcgttcagcgccgatcacgcggccttcggtggtcaccaataacaaacgctgtcctggcggtgcccacttatcaatcgcccggaacagacgccgccaccacattaaatcgttgggcggatcgttcgccagctccgcttcgacatgctgctcaatcatcagcccctgacgctgttcgctatccagaagctcggtcatctggcgactatcgagcttgggtaacatcaaaaccaacatcaacaccagcgccagcgtcagccagaagatggcgaagatgcgcgcggttaagctgcctatcatgaagcagaaaccatcagatattagctcaactagcagaaaccatcagatagccgcgaccacgcaaggttttaaaccacgggtgaccatctttacgatccggcagtttacgacgcaggttggaaatgtgcatatcaatagcgcggtcgaaaggcgtcaggcgtttgcccaacacttcctggcttaaatgttcacgggaaaccacctgacccagatgctgtgccagcaaatagagcagggtaaactcagtaccggttaactccagcgtttgcccgtcgaagctggcttcctgacggcctggattcagcactaaggcatcaacttccagtgtcggactaccgttgtcgttgttttgctgttgctcgctccagtggctacggcgcaggatcgcgcgaatacgtgccaccagctcacgatcattaaacggtttcgggagatagtcatctgcgcccagctcaaggccgagaacgcgatcaagttcactgccgcgcgccgtcaacataatgacaggcgtctggtgtgtctggcgaagtgcttttaatgtgtcgataccatttttcttcggcatcattacgtcaagcaaaagtaaatcaatgctgtcgtccagaagatcaagcgcctgttccccatcgtgggcaacaatcacgttgaagccttccatctcgagcagctcctttaatagggaagtcagctctcggtcatcatcaactaacaggattttattcattgtttaaatacctccgaggcagaaattacgtcatcagacgtcgctaatccatgactttacgttgttttacaccccctgacgcatgtttgcagcctgaatcgtaaactctctatcgttgaatcgcgacagaaagattttgggagcaaatgatgcgcatagttaccgctgccgtcatggccagtacgctggcagtcagtagtttaagccacgctgctgaagtcggtagtggcgataactggcatccgggtgaagaacttacgcagcgcagtacgcagagccatatgttcgacggcataagtttaaccgaacatcagcgtcagcagatgcgagatcttatgcaacaggcccggcacgaacagcctcctgttaatgttagcgaactggagacaatgcatcgccttgtcaccgcagaaaattttgatgaaaacgctgtgcgcgcacaggcagaaaaaatggcgaatgagcaaattgctcgtcaggttgagatggcaaaagtccgcaaccaaatgtatcgcctgttaacgccggagcagcaagcggttttaaacgagaaacatcaacaacgaatggagcagttgcgtgacgtgacgcaatggcaaaaaagtagtagcttgaagctattgagtagtagcaacagtcgttcccagtaataaaccctgttttccttgccatagacaccatccctgtcttcccccacatgctgtgggggtttttttatcctcaatttgcctgctgcttaatgcattgcagatgatttgcttccgttatactagcgtcagttgatagcgggagtatttatgaatcaatcttatggacggctggtcagtcgggcggcgattgctgcgacggcgatggctagcctgctattgctgattaaaatttttgcatggtggtataccgggagcgtgagtattctcgccgcgctggtggatagcctggtggatatcggcgcgagcttgacgaatttattggtggtgcgatattccctgcaacctgccgacgataatcacagctttggtcacggtaaagctgagtccctcgcggcgctggcgcaaagtatgtttatctccggtagcgcactattcctgtttttgacgggtattcaacatctgatatctccaacaccgatgacagatccaggcgtcggggttatcgtgacaattgtggcgctaatttgtacgattatccttgtcagctttcagcgttgggtggtgcggcggacgcaaagccaggcggtgcgggctgatatgctacattaccagtctgatgttatgatgaacggcgcaattctgctggcgctggggttgtcctggtacggctggcatcgcgccgatgctctgtttgcattgggaatcggcatctatattttatatagcgcgttacgcatgggatatgaggcggtacagagtttactggatcgcgcattgcctgatgaggaacggcaagaaattattgatatcgtgacttcctggccgggtgttagcggcgctcacgatcttcgcacgcggcagagtgggccgacccgctttattcagattcatttggaaatggaagactctctgcctttggttcaggcacatatggtggcggatcaggtagagcaggctattttacggcgttttccgggaagcgatgtaattatccatcaggacccctgttccgtcgtacccagggagggtaaacggtctatgcttagttaatcagtataaaagagagccagacccgcattttgtgtataaaataccgccatttggcctgacctgaatcaattcagcaggaagtgattgttatactatttgcacattcgttggatcacttcgatgtgcaagaagacttccggcaacagatttcattttgcattccaaagttcagaggtagtcatgattaagaaaatcggtgtgttgacaagcggcggtgatgcgccaggcatgaacgccgcaattcgcggggttgttcgttctgcgctgacagaaggtctggaagtaatgggtatttatgacggctatctgggtctgtatgaagaccgtatggtacagctagaccgttacagcgtgtctgacatgatcaaccgtggcggtacgttcctcggttctgcgcgtttcccggaattccgcgacgagaacatccgcgccgtggctatcgaaaacctgaaaaaacgtggtatcgacgcgctggtggttatcggcggtgacggttcctacatgggtgcaatgcgtctgaccgaaatgggcttcccgtgcatcggtctgccgggcactatcgacaacgacatcaaaggcactgactacactatcggtttcttcactgcgctgagcaccgttgtagaagcgatcgaccgtctgcgtgacacctcttcttctcaccagcgtatttccgtggtggaagtgatgggccgttattgtggagatctgacgttggctgcggccattgccggtggctgtgaattcgttgtggttccggaagttgaattcagccgtgaagacctggtaaacgaaatcaaagcgggtatcgcgaaaggtaaaaaacacgcgatcgtggcgattaccgaacatatgtgtgatgttgacgaactggcgcatttcatcgagaaagaaaccggtcgtgaaacccgcgcaactgtgctgggccacatccagcgcggtggttctccggtgccttacgaccgtattctggcttcccgtatgggcgcttacgctatcgatctgctgctggcaggttacggcggtcgttgtgtaggtatccagaacgaacagctggttcaccacgacatcatcgacgctatcgaaaacatgaagcgtccgttcaaaggtgactggctggactgcgcgaaaaaactgtattaatgatttcggaaaaaggcagattcctttaccctgaaaccgatgacagaagcaaaaatgcctgatgcgcttcgcttatcaggcctacatgaattctgcaatttattgaatttgcaaacttttgtaggccggataaggcgttcgcgccgcatccggcatggacaaagcgcactttgtcagcaatatgaggcggatttcttccgcctttttaatccctcaacatatacccgcaagttatagccaatctttttttattctttaatgtttggttaaccttctggcacgctttgctcatcacaacacaacataagagagtcgggcgatgaacaagtggggcgtagggttaacatttttgctggcggcaaccagcgttatggcaaaggatattcagcttcttaacgttagttatgatccaacgcgcgaattgtacgaacagtacaacaaggcattcagcgcccactggaaacagcaaactggtgataacgtggtgattcgtcagagtcacggtggcagtggtaaacaagcgacgagcgtaatcaacggtattgaagctgatgttgtcacgctggctctggcctatgacgtggacgcaattgcggaacgcgggcggattgataaagagtggatcaaacgtctgccggataactccgcaccgtacacttccaccattgttttcctggtacgtaagggaaatccgaagcagatccatgactggaacgatctgattaaaccgggtgttagcgtgatcacgcctaatccgaaaagctctggtggcgcgcgctggaactacctggcagcctggggctacgcgctgcatcacaacaacaacgatcaggcaaaagcacaggattttgttcgggcactgtataaaaacgtcgaagttctggattctggcgcgcgtggctccactaacacttttgtcgagcgcggaattggcgatgtactgattgcctgggaaaacgaagctctgctggcagcgaatgaactggggaaagataaattcgaaatcgtcacgccgagtgagtctatcctcgcagagccaaccgtgagcgtggtcgataaagtggtcgagaaaaaaggtactaaagaggtggcggaagcctacctgaaatatctctacagcccagaaggtcaggaaattgccgcgaaaaactactaccgtccgcgcgacgctgaggtggcgaaaaagtacgaaaatgcgtttccaaagctgaagttattcaccattgatgaagagttcggcggctggacgaaagcgcaaaaagagcattttgctaacggcggtacgttcgatcagatcagcaaacgctgatttccccaggataattatcaaacccggtggtttctcgcgaccgggttttttatttgtcacgattttgcgttacccttgcatctctttgaggtacagggaaaaaaagatgaaaaaagcgggtcttctttttttggtgatgatagttatcgccgttgtggctgccggtattggttactggaaattaaccggtgaagagagcgatacattacgtaagattgtccttgaggaatgtttgcccaatcagcagcaaaatcaaaatcctagcccatgtgcggaagtcaaacccaatgccggatacgtggttttaaaagatcttaatggcccactgcaatatctgttgatgccaacgtatcgtattaacggtactgaaagtcctttgttgaccgatcctagtacgccgaacttcttttggttggcttggcaggcgcgtgattttatgagcaaaaaatacggccagccggttcccgatcgcgcggtttctttggcgatcaactcccgcaccgggcgtacgcaaaaccattttcatattcatatctcttgtattcgtcctgatgtgcgcaaacagctggataacaatctggcgaacatcagcagccgctggttgccactgccaggtggtttgcgcgggcatgaatacctggcgcgtcgggtaacggaaagcgaactggtacaacgcagcccatttatgatgctggcagaagaagtacctgaggcgcgggaacatatgggacgctacgggctggcgatggtacggcagagtgataacagttttgtattgctggcgacacaacgaaatctactgacgcttaaccgtgctagtgccgaggaaattcaggatcatcagtgtgagattttgcgttaaggcgaagagttaaggaaagtaagtgccggatatgaaatccggcacctgtcagacttaagcctgtttagccgcttctgcagctttaacgattactgcgaaggcgtcagctttcagagaagcaccaccaaccagcgcgccgtcgatatccggctgagcaaacagttctgcagcgttagacgcgtttacagagccgccgtactgaatgatcacttgttcagcgatgttagcgtcaactttagcgatgtggtcacggatgaatttgtgaacagcctgtgcctgagccggagttgcagatttgccagtaccgattgcccatacaggttcgtaagcgataaccgcaccttcgaatgccgcagcaccctgagttttcagtaccgcgtcgatctgacgtgcgcaaacttcttcagttttgcccgcttcattttcagcttcggtttcaccgatgcacagaaccggagtcaggccctgctctttcagcaccgcgaattttttcgcgatcagttcgtcagattctttgtggtaagtacgacgttcagagtgaccgatgatgatgtactgtgcgccgatgtctttcagcatagcagcagaggtttcaccggtgaatgcgccggacaggttcaggtccacgttttgcgcacccagcatgatgtggctgccttcagcttcgcgcttcgccatatcgatatacatttccggtggtgcgattgcaaccgcacagccagcaacacctgccagctctttacgcaggttagaaaccagctcgtgaaccatgtggcggctgccgttcagtttccagttacccatcactaaaggatgtcgcattttaattctccacgcttataagcgaataaaggaagatggccgccccgcagggcagcaggtctgtgaaacagtatagagattcatcggcacaaaggctttgctttttgtcatttattcaaaccttcaaggctttcagatagcgccagcttaatcggttcaacagcgaaggtcagccccttttcgccgttgtccgcgacaacataacgcagtgcaccttctgtctcggtgtaataacgtttgtttttccccgccgttagtaggctctgcagttttttctggctttgtgttttggtcattaatggggtgagtgtgcggatcaccgctgccatgtattcctgagctttcgctttcgcggctttttgctctggcccctggatgggtagccaggtcatttgaatgcttttgatttttaaggtaccgcgctccagcgctgtagaagcatacaagttctcattaattttacttgcagcacgagtgagattggctttgtcgggactgctgtcgatggcacgaaattcgttcagtggcaggctgggattctggctgttaaagtcttctcgaaactggctgatggagagatcgaaagtaggggctccagccagcagataaggcgcggtcgttgccgtatctggtgtttgtgcatgcgcctctgttgtaacggttaatgcagaacataagagaaaaaacagcgtacaccctggcttcattgacagtaccttttgttatgactggctccgattaaaacgatatctgtcgcccttgtcaaaagggtagaatcctggaaaagacaaccatcaaggaacttacatgaccatacagcaatggttattcagttttaaagggcgtattggacgccgtgatttctggatttggataggcctgtggttcgcaggcatgctggtgcttttcagtctggcgggtaagaatctactcgatattcagaccgcggcgttttgccttgtgtgcttgctctggccaacagcggcagtaactgttaagcgcttgcatgatcgcgggcgttccggcgcatgggcatttctgatgattgtggcgtggatgctgctggcgggtaactgggcgattttaccgggtgtctggcaatgggcggtggggcgttttgtcccgacgttgattctggtgatgatgcttatcgatcttggtgcgtttgttggcacacaaggcgaaaataaatatggtaaagatactcaggatgtgaagtataaagccgacaataaaagtagtaattaacctttaatatatctcttactgctatttttttccgggattgttatttccacgatgcaaatgacaatacccggaaaatccttctgaactcttcaccttaagcaatatcaaaaaaaatggtaatccataagatcattacttgtttgttcttcccttaacggcgcattattcttaagtcgtaatcgacagagaggcgaatatacagaggtgccctatgaaagatgtcgtagataaatgcagtactaaaggatgtgcgattgatatcggtacggtgattgataacgacaactgtaccagtaagtttagccgcttttttgccacccgcgaagaagcagagtcttttatgaccaaactgaaagagcttgccgccgctacatcctctgcagatgaaggggccagcgtggcctataagattaaggatctggaggggcaagttgagcttgatgcggccttcactttcagttgccaggccgagatgattatttttgagttaagtctgcgtagcttagcttgatggagttgctttagaaggagttaaacatggcttataaacacattggcgtggcaatttccgggaatgaagaagatgccttactggtgaataaagccctggagctcgccagacataatgacgctcacctgacgttaattcatattgatgatggcttaagcgagttgtatccgggtatctacttccctgcaacagaagatattcttcaattgttgaagaataagagcgataacaagctgtataaactgacgaaaaatattcaatggccgaagacaaaactgcgtattgaacgcggagaaatgccggaaacactgctggaaattatgcaaaaagagcagtgcgacctccttgtctgtggtcatcatcacagttttatcaaccgtttgatgccggcatatcgcgggatgatcaataagatgagtgcggatttgctcatcgtgccgtttatcgataagtaaccgcttaccagtaatgctccgctgtcatatggcccggtcggcgacgtaaatgtttcgtcatctgccgggtctctttcagcaactgttgtgtatcgcgcaccatctgtggattgccgcacagcatcacatggctggtttctttattcatcggcaggccaatcgtgctttccagttccccactttcaattaatgccggtatccgtccggtgaggctccccgctgccgtttcccgactgaccaccgtctgaatgcgcagttttccttcgtagcgtttttccagttcctgcatcagtggcaaatagcttaagtcggcggcataacgtgcggcgtgcaccaggaccagatttttgaagcgatctaaatctttacctagttgcagaatgcttaaataagggccaatcgctgtaccggttgccagcatccatagcgtttcgcagtgcggcacttcatcgagcacaaagaatcctgccgcttcgctaaccacctgcacttcatcgcctggtttcagtgccgccagtcgtgggcttaatttgccatcggggacggtgaccaggtaaaactccagatcgggattatcggggctgtttacataggagtaggcgcgctggacgcgttcgccgtcgatttcaaggccaagcttggtaaattgcccggcggtaaacggaagcacgggggcgtgaacggtgagactaaacagggcgtcggtccagttctgcactttagtgactttgcctgttacccaatcagccatgtttttctcctgttttgattgacttgccttatcttcgttctccgaacaaaaaaattccagtcccgaaggactggaaggctcaatcgatcaaatcaatcagaggatgtgcacctgcatttccgggtctttgcgatccagatagtggatggactgaatgcggcgaatggtgcgactcttgccgcggatcagcagcgtttcggtagtcgcgatattgcctttgcggctaatgccttccagcagatcgcctttggtaataccggtggcagagaagatgacgttatcgctgcgcgccatatcgcccaggcgcaatactttaccggcttcgatgcccatcgctttgcagcgtgccagctcctgctcgccaatgcgacgattctcttcgttgtcgcctttgacgtcatgacgcgccagcagacgaccgttcatgtcgccatctaatgcgcggatcaccgccgcagaaactacgccttccggcgcgccaccaataccgtacagcacgtcaacttcgctgtctggcatacaggtgagaatactggccgcaacgtcgccgtccggaatagcaaatacgcgtacgccgagttgctgcatttcagcgataacggcatcgtggcgtggtttagccagaatcgttaccgtcagttcgctcaacggtttgccgagcgccgccgctacattgcgcaggttatccgccagcggcaggttcagatcaatggtgcctttggctcccggcccgacaatcagcttctccatatacatatccggcgcattgaggaagcagcctttatcgcctactgccagcaccgccagcgcgttagcctggcccatcgccgtcatgcgcgtgccttcaatcggatcaacagcaatatctaccgcgtcgccgcgaccagtaccgactttttcaccaatgtagagcatcggtgcttcgtcgatttcaccttcaccaatgacgatggtgccgtcaatgttgacctggttgagcataatacgcatggcgtttaccgccgcgccgtccgcggtgtttttatcgccgcgtcctaaccatttgtagccagccagcgccgcactttcggtgacgcgggaaaattcgatggcaagttctcgtctcatagcaaactctaagcagtaaggaatggcgcgaagtgtagcacaggggaagggagggattattgatgtgtgcggggttgcccccgcacgtttcgggactaccggatgcggcataaacgcttcattcggcatttacattattcgtcgtgttcttcccacgccatcgcgcgtttaaccgcttttttccagcctgcgtaacggtaattacgctcagtggtttcgatgcctggacggaactcgcgctcaatcaccgctttctcttgcagctcgtcgaggttctgccagaagccaaccgccaggcctgcgagataggccgcacccaatgcggtgacttcgcgcacttccgggcgctcaacgcgggtgccgagaatatcggactggaactgcatcaggaaattgtttgctactgcgccaccatccacgcgcagggcgtgcagacggataccagagtcggcctgcatcgcttccagcacgtcacgcgtctgataagcaatagactccagcgtcgcgcgtataatgtggttagcgttcaccccacgagtcagaccgaaaatcgccccgcgcgcatacgggtcccagtacggcgcacccagcccggtaaatgccggaaccacatacacaccattggtgttttgcactttggtggcgaaatattcggaatcgtaggcgtcgttaatcaacttcatttcatcgcgcagccactgaatggatgcgcctgccataaacaccgcaccttccaacgcatagttcacttcgccagtcgggccgcaggcgatggtggtcagcaggccgttttcacttttcaccgctttctcgccagtgttcatcagcataaagcagccagtgccataggtgttcttcgccatcccttctttcacgcacaactgaccaaacagcgcggcctgctggtcaccggcgatcccggagattggaatacgcgtgccgcctttgccgccaatgttagtctgaccgtatacttcggaagaacgacgcacttctggcagcatctcgcgcggaatatccagcacttccagcattttgtcgtcccagtccagggtatggatgttgaacaacatggtacgagaggcgttggtgtaatcggtcacatggacacggccctgagtcattttccagataagccacgtatcaaccgtaccaaacagcaattcaccacgacgtgcacgctcgcgagagccttccacatggtcgaggatccacttcactttggtgccagaaaagtacgggtcaatcaccagaccggtattgctgcggatataatcttctaaaccgtcacgttttaaatgctcgcagatttctgcggtacgacggcactgccagacaatggcgttatagataggcttgccggtttctttttcccagacaatagtggtttcacgctggttcgtaataccgatagctgcaatttgatcggaactgatatcggctttcgccagcacttctaccagcgtggagctttgggtggcccagatttccattgggtcgtgttctacccaacctggttttgggtagatttgctcaaattcgcgctggctcacgctaatgatattggcatcgtgatccattacgaccgcgcgggagctggtggtgccctggtcgagcgcaacgatatattttttttcagtcatgtttaattgtcccgtagtcatattacaggctagctttttgttcactaggagttgtggtttccttttcttccacaacacagatatcgcaaggcaaatggcgaccaatcagtttgcggtaggcaaatgcacctacaatcgcgccaacgatagggccgaaaagcggcaccaggaagtaaggaatgtctctgccgccggtaaaggcgacattgccccagcccgccagccaggcaaagactttcggaccgaagtcacgcgctgggttcatggcaaaacctgtcaatgggcccatagatgcgccaatgaccgcaatcagtagaccaatcagcaagggagccaaagggccgcgtggtacaccgttgccatcgtccgttaacgccaggatcagccccatcagaatagcggtaatcaccatctcaactgcgaaagcctgcacaaaattgatatgaggattagggtaagtagagaaagtgccagccagatcaacactttcaacgctgccgcgaacaatgtgatgagtctgctcgaagtcgaaaaataaattgtagtaaagcccgtaaactaaagccgcagcacagaaagcgccggcaacttgactaacgataaaaggaataactttgcgcttgtcgaaacaggcaaacagccacaatgcaatggtaacagcgggattaagatgcgcgccggaaacccctgcggtcaggtagatggccattgccacccccagtccccaaatgacactgatttcccactgaccaaaagacgcaccagcgacttttagtgctgcaacgcaacccacaccgaagaaaatcaacaacccggtaccgaggaattcagcaatgcactggcctttcaaggtacttgtttgactcataatcggatcctgaagagttaatgtttgttgtatgcgtgaaagtcacggacctccacgatgcttgtaggcatgctgtaaacttatcgttaacgagcaaaaacgagaaatatcgaacttaaaatgtgtgtgcctcgtcataaaatgagcgttatcgcgccatttattccatctgattgtacatgatgcatgtttgttagatcattcgcgcaacaaatttattaacattttcgattgatgtggattatgtcaccaggagaaggatgaaaagtgtggcaaaccgtaatctgcaaggcgtgccgctggacagcgatggcgcggcttcatacaatcggagctaactaaagtgcgctcgtatttattaaggcgtcaccggtaatcgggacgaggatttttatccatcaacgccttgcaattcaggagaggtatgacaatgagtttagaagtgtttgagaaactggaagcaaaagtacagcaggcgattgataccatcactctgttgcagatggaaatcgaagagctgaaagaaaaaaacaacagtctgagccaggaagttcaaaatgcccagcatcagcgcgaagagctggagcgtgagaacaaccatctgaaagaacagcagaacggctggcaggaacgtctgcaggccctgctgggtcgcatggaagaggtctgattacgcttcatcttccgcgtaatttctttactgtgtaggccaacaggtaacgcagaaaaaaggcaccttgcggtgcctttcttatcattcaatatccagcggatcttcactaagaataatcccggtattgtcggcataaagatggtcgccggagaagaaggtgacaccgccaaaattgacgcggacatcgctttcgccaatgccttcgccagcggcaccaaccggaattgccgccatcgcctggatgccgatatccaactcttccaggtcatctacctgacgcaccgcgccgtaaatgaccagaccttcccattcattttgtactgccagacgcgccagttcagcatcgaccagtgcgcgacgaacagaaccaccgccatcgacgacaagaacacgaccacggccattctgttcgagcagatcgtacagcaacccgttgtcctcgaaacattttaccgtgattatttgtccgccaaagctcgcccgtccgccaaagttggagaacagcggttccacgacgttaacatcttcttgatagatgtcacaaagctcggaagtatcgtatttcataggcttaacattcagttgctgcgagaattttcagtatatcgcgctatgtgggctgttggcaaaatcatcaattgttaattgatatttgtcagttatgctgcccactggcttaggaatatccctaaaacaaacagcaggttagtcagtaacgctcccttgacagtacgttccagcattggtcgcatcgccaccgggtccatttcccgcatcacataacgggcttgcttcaccagtaatggtgccgccagcaggaacagccagccccacaggctatgcaggctaaagagattaaacagcgccagacacaccaggctgcccatcagcaggcaggcatgataacgacgcgcgttcacttcacctaagcgcaccaccagcgtgtttttgccattttcgcggtcgctattgatatcacgcaggttattaatattcagtactgccgttgccagcaggccgcatgcggtcgccggaaggatcagtgccggaatcaatgtatgagcctgtaaataccagctccccatgacactcaaccagccaaagaaaaccagtacggaaatatcacccagaccgatataaccataaggacgattgcccacggtgtaggtgatagcggcaatgatgctcaacccgccaagaatcaggaaaccgacaaaatcggccagcgtatggcatgccactgcaaccagtgccagcccggagagacagatgagcacgacggtaataatgagcgcccgtttcatctcttgctgggtaatgacccctttttgcatgccgcgtagcggcccaatgcggtcaggtttatcgctgccttttaccgcatcgccgtaatcattggcgaggttagaaaggatctgtaatagcccggcggtaattagtgccagcagggcgaccagcggatcgaagtgaccttgccaccatgccagcgctgtcccgacgataattgcagcaaaggcgagggggagggttttaggtcgtaaactttccagccacgcctgagttcggctaatttgttgttcagtcataatacgcgccaataaaaatggggcctttcagccccatcaaacaatgatgaaaatgattgaacgcgattataggataaaacggctcagatcttcatctgccaccaacgcatccagatgtttgctcacataatctgcgtcaatagtgatattttgaccgcttaaatcgctggcgtcgtaggaaatctcttccattaaacgctccagaacagtgtgtaaacgacgagcaccgatgttttcggtagattcgttcacctgccatgccgcttccgcgatgcgtttaataccggagtcggtaaactcgatatttacgccttcagtcgccatcagtgctttgtactgcacggtgatagaggcattcggctcggtcagaatacgctcgaagtcgctggtggtcagcgcctgcagttcaacgcggattggcagacgaccttgcagttccgggatcaggtcagacggtttcgcaatctggaacgcgccagaagcgataaacagaatgtggtcagttttgaccatcccgtgtttggtggaaacggtgcaaccttctaccagcggcagcaggtcacgctgaacgccttcacgagaaacatccggaccggaagactcgccgcgcttacagattttgtcgatttcgtcgataaacacgatcccgtgctgctcaacagcgtcgatagcgtcttgcttcagctcttccgggttcaccagtttcgccgcttcttcttcaatcagcagcttcatggcgtctttgattttcagcttacgcgctttttgcttctggccgcccaggttctggaacatggactgcagctggctggtcatctcttccatgcccggaggagccataatttcaacgcccatcggtgctgcggcaagatcgatctcgatttctttgtcatcaagctggccttcacgcagttttttgcggaatgcctgacgagcagcggacggttcctgctgctgttcggtctgtccccagttgtttttagcaggtgggatcagcacgtcgagaatacgttcttctgccagttcttcagcgcgataacggtttttctcgatagcctggacgcgtaccattttcacggcggcatcggtcagatcgcgaataatagaatccacttccttaccgacgtagcccacttcggtgaatttggtcgcttcaactttgatgaacggcgcattcgccagcttagccagacgacgggcgatttcagttttaccgacaccggtcgggccgatcatcaggatatttttcggggtcacttcatggcgcagctcttcgttgagctgcatgcgacgccagcggttacgcagagcaatcgccacagaacgcttggcgttgtcctggccgatgatgtgcttatccagttcgctgacgatttcgcgtggggtcatttcagacatgggagatccttacgctttgtagcttaattcttcgatggtgtggaaatggttggtatagatgcaaatgtcgcctgcaatatccaacgccttttcagcaatttcacgggcgctaagttcagtgttttctaacagcgcgcgcgccgcagcctgggcgtaagggccgccggagccgatagcaataagatcgttttctggctgcaccacgtcaccgttaccggtgatgataaggcttgcagtttcatccgcgactgccagcagtgcttcaagtttgcgcagcatgcgatcggtacgccagtcttttgccagctcaacggcggctttgaccagatggccctgatgcatttccagtttacgttcaaacagttcgaacagcgtaaaagcatccgcagtaccgcccgcaaagcccgcgatgactttgtcgttgtacagacggcggacctttttcacgttgcctttcattacggtattgcccaacgtggcctgaccatcaccagcgatgaccacatggccgttacggcgtacgcttactatagttgtcacgagctgaccccttggttacgaatacagagtacaaaccccgtacaaaagtacggggcataatgcaattatagatgggggggattttgagggtttcaacccccggcggcgagccgaatgcagtttgtatgacccgccatcttcaaccgattgagggtgctgtctgcgttctctttgcctttcaccgggccaatgaccacacgattccagccattgttggtggtgattttgctgtcaaagccttcgaacgccagctgagcacgtaccgtctctgcctgttccgcgcctctgaagctaccgcactgcaccatccagcggcgttcgtcttttttctccgccgtcggttttggcgcgtcagcggcacgagcaactggcgcagcttgctgcggcttgctctgcgcagtcgtgtgcgcaggagtttgcagcagatcctggtacggctgctgagaagaagccggtttagactggcgcggttgcgcctgtaccggtgcggcttggctcgtacgcgtctgctgctgccagctttgttcagtcgtacggctctgctgagccaggcgttgctgttccgctaattgctgcgcctgacgttggcgctgtagcgtttgctgacgctgttccggcgtctgttcattccacggaacttcaaccagctgcgttggctgctggcgcatatcagcctgcatttgttcaagaagctgacgttgttctggtgtcagttgctccggcgttttcacttcaccaccggcagaaggttctgtgggcgcacgcactcccggctggcgactttccagctctttaatgtagcgccagcgttcttctggttttggtggtagtccgtttccggtcactttctggctttgcagcgtctcggactcttctttcttgtgatgcgtaatgaagtacagaccaccgataaaggtcacaagaacggcggcagcaatagcgaccatagcgggagaaaccgcaggcagatttcgttgctttttccgactggtgctcttttttcgccggctaggtgccggttggctgcggcgtacataatctcgttgtgccactatcgtttcgctgtatttattcgttcgtcagcccgccatgttacttaagcggcgggcctttgaccagtcacggcagtcttaaaggtttactttaaggtaacgcgcgtgtacttccccggatgataagttcgcagtccattaaacgagagccactgccaacgtgttgcccctgcatttgatcaagcaataacagcatagcttcccgaccgatttcgtaacgcggctgcgcgatggttgtcagcggcggatcacaaaattgcgtcaggtcgatgttatcaaaaccgattatggaaaggtcttccgggactttcagcccctggcgttttgcctgagaaagtgcgccgagcgccatcacatcgctatggcagaagacagcagtaggcggttgtggaagatcaagcagctgctgcatcgctttgcttccggcttcgaaggtgaagtcgccacgggcgatgtattgcggatcaaccataatgccgcagcgacgcagcgcctgaacatagccttgcaggcggtagtgacacagcggcatctcttcgggaccggctatacagccaatccgtttatgcccttgctcatataaataatttactgcatcaaatgcggcggtcagattgtcgatatgaactgtaggcagctccagctccggtgcaaattcgttcgccatcaccatcggcggcagattacgctgttcctcaatgctggcatcaaacggcagcctactacccagcaacaacatgccatcaatttgcttggtgatgatcaaatcgataaaggttttttcctgctgattttgatgcgcacagtcgccaatcagcaccagatatccgtgatttgccgccgtaacttcgataccgcgaataatttcgctaaagaagggatcgcagatatccgggacaatcaccagaatggtgcgggattcattacgcttgacgttgcgccccataggctgcggtaaataacccacttcccgggccgctttttcaacccgattacgggtggcctgggagactttatcgggattcattaatgctcgggagacggtcgctgtagagacttttgccttgagggcaacgtctttcatggtcgcggcagtttcctgcttcttcgctttcacactcactcctcgcctggcacgtcaggcgtactacatccatgtttacttcacatcggcaacatttttagcagatagcgcgtgaaaacggttacagaattttcatgaaaagtgtgatgaatattgaatttttcgatccgcctcgcatcgtgagcggtttaaccctcaatcggatcaacatccagcacccatttcaccttacgggaatccggtattgtattgatgagcgccagcgtaccgttaatgatgtgttgcaagcgcacgcgggaagggtgctgcaacaatatctgccagcgccagcgaccgccacgtttaggtgccagagccggaaccggaccgagaacccacagtttctcgtctgccagtgggctggagaggatcagattacgcagttgttgcaggaacaatggcgcgtgctgattgttatgatcttccgcacgcacaatcacatggctggtccacggcggtagctgcatcattcgccgctcagccagcgcctgttcggcaaaggcgtcgtagcctttatagagcaacgtttgcaacagaggatgttccggatggtgcgtttgcagcaccacttcgccctgtttacccgcacgcccggcacgaccggcgacctgggtgtaaagctgagcgaaacgctctgcgctgcgaaaatcggcagaaaacagcgcgccgtccacgtccagtaatgcaaccagcgtcacatccgggaaatggtgacctttcgccagcatttgtgtaccaatcaaaatccgcgcgccgccgcgatgtacttctgccagttgctgttccagcgcccctttgcggctggtggtatcgcggtcgatacgagaaatgggcacgccggggaacaacggcgcgagcgtctgttcaagctgttcggtgcccagccccacggggaccaggtgcgtggaaccgcaggaagggcactggcgcggcaccggacgctgactgtcacagtggtggcagcgcagatggtgctgcgcctgatgcagcgtgtagtagtgatcgcaacgtgggcattcggcaatccagccacagtcgtggcacagcagtgcaggcgcaaagccacggcggttaagaaagagaatgacctggttatcagcctgtaaatgctggcgcatacgagtgattaacgccggagccagacctgcctgcaccttctgaccttttaaatccagcacatgttgaattgccggacgcgcattccctgcccgacgggtcaggcgcagcaggcggtattttttctgctggacgttgcataacgtttccagcgcgggcgttgcggagccaagaataatcgggatttgctcgctgtgcgcacgatacaccgccaggtcgcgggcatgatagcgccagccttcctgctgcttgtaggagctgtcgtgctcttcatcaatgacaatcacgccgagatttttaaacggcgtaaacagcgcggagcgggtgccgatcacaatcgccgcctcaccatttttcgctttcagccacgcgctaagacgctcgctgtcgttcaggccggaatgcagaacttccacgggggcattaaaacgttcacgaaaacgggcgatagtttgcggtgtcaggccgatttccggcaccatcaccagcgcctgtttgccctgagcgagcacgttttccagtacgctgagataaacctccgttttaccggaaccggtaacgcccgccagcagccaggcagaaaaagtatctgccgcgctatgaattgcgccaacggcggtggcctgttcggtattcaatcgcaaccgctcaccagaaacggcatagttcgttcgccagtcgctaaactctggtgtttcacttgctaaatcacacagaccttttttgcgtagcgcctgcaacgcggcatcattaaattcgagcgtggcgacctggtcgcgccagattttgccttgccgtaacgccgccagcgcctgttgttgcttgggggagcgtttcaggctgttcagatccaccgcctggccttgttcagtggcaaaccagtaccacatcggcgcgttcgccgcaggccgcccctggcgtagtaaaatcggcaaggcatgaaacagcacatcgccaatcggatgatgatagtaatctgccgcccatagcagcaatcgccagacggagtgagtaaacaccggctcactatccagcacttcgactaccgcttttagctcattgagcggcagttcgctggcatcgctaacacttaccacaatcccgatgcgctcctgctgtttgccaaacggcacgcgcacgcgacacccagctttaaccgtcatgccttctggcagcagatagtcaaaggtacgaggaagcggaacgggcaaggcaacgtgggcaacgggcatagcatcatcctgacttgaaattcggtgggttagtatacacattgccgtagaagagtgcggatcagtttgcatacgctggttaatttctgtatgatttcgcgccttcgtacgaaatgatcgtattgaagctatacttttaacatcgcgtggtgtctggcgttagggctggaagagcgacgcggccttaaaccgaggttttcccatgaaaaaagatattcacccgaaatacgaagaaattactgctagctgctcttgcggtaacgtaatgaaaatccgctccaccgttggtcatgacctgaacctcgacgtgtgcagcaagtgccacccgttcttcactggcaaacagcgtgatgttgctaccggtggccgtgttgaccgcttcaacaagcgtttcaacatcccgggcagcaaataagaccggatttccgaaaaaagcgccgcacggcgctttttttgtgcctgaattttggtcgtattaccagctaaacagcggccattctttggcgaccgtggtgagttgtggcgcatcgaaaacggcttgtgggctgaccaccgtttcctcaagcggaatattcttgccgtaacgttctttgagctttgcctgaacttgtgggctgctcaggtcgaactctttcaacttctgctgctcgcccacgcgcattcccagcgcgttctggtaaaccttccacaccacttcgctacagtactggcgatcgtcgctccaactgaagctgaaatcatacggtttaccgagataacgttttgccgtttgcgccagtttttgctgttgttcaacactcagtccgccttcaacgcggcgaacaacgtatttgcccttttcaccatgggcgatccactgcttgagcggggtgtatttcaccgggccgactgcttcaaaaacgtagggctttttgttgcgtatcaccagcataccggtgtggctataatcggtatgggtcgccagttggatcgctttactttggctactgcgagagatctgaaagatgatgtcgccggtttgtggctgccaggcaaaggcaggtacagaaaccagcaggctgaggatcagcagcctgtttttcatagttaaacgtccatgtataaaaagcggtgggtcgcagacaacgtgctcgttgtttatgccggatgcggcgtgaacgccttatccggcctacaagttcgtgcaaattcaataaattgcaatatgacgtaggcctgataagcgtagcgcatcaggcgattccactccgcgccgctcttttttgctttagtattcccacgtctccgggttaatccccatctcacgcatgatctcttttgccgcttccgggatttcgtcgctgcgctctttacgcagatcggcatcatccggcaaaggttgcccggtaaaggcatgcagaaacgcttcgcacagcagctcgctgttggtagcgtgacgcaggttgttcacctgacgacgcgtgcgttcatcggtgaggatttttaacaccttaagaggaatggaaaccgtaatctttttgacttgttcactcttcttgccgtgctcagcgtatgggctgatatattcgccgctccattcagccatgagatacttaatcctcttcgtcaataaattgagaccagaccacacagttgatgtgggtactgaccgtaaacccgcatagtttaccgtacaggcgttaccgtgacatcgtgtaatgcacctgtcggcgtgataatgcatataattttaacggctatttgggatttgctcaatctatacgcaaagaagtttagatgtccagatgtattgacgtccattaacacaatgtttactctggtgcctgacatttcaccgacaaagcccagggaacttcatcacatgacgcgtaaacaggccaccatcgcagtgcgtagcgggttaaatgacgacgaacagtatggttgcgttgtcccaccgatccatctttccagcacctataactttaccggatttaatgaaccgcgcgcgcatgattacagccgtcgcggcaacccaacgcgcgatgtggttcagcgtgcgctggcagaactggaaggtggtgctggtgcagtacttactaataccggcatgtccgcgattcacctggtaacgaccgtctttttgaaacctggcgatctgctggttgcgccgcacgactgctacggcggtagctatcgcctgttcgacagtctggcgaaacgcggttgctatcgcgtgttgtttgttgatcaaggcgatgaacaggcattacgggcagcgctggcagaaaaacccaaactggtactggtagaaagcccaagtaatccattgttacgcgtcgtggatattgcgaaaatctgccatctggcaagggaagtcggggcggtgagcgtggtggataacaccttcttaagcccggcattacaaaatccgctggcattaggtgccgatctggtgttgcatagttgcacgaaatatctgaacggtcacagtgacgtagtggccggcgtggtgattgctaaagacccggacgttgtcactgaactggcctggtgggcaaacaatattggcgtgacgggcggcgcgtttgacagctatctgctgctacgtgggttgcgaacgctggtgccgcgtatggagctggcgcagcgcaacgcgcaggcgattgtgaaatacctgcaaacccagccgttggtgaaaaaactgtatcacccgagcttgccggaaaatcaggggcatgaaattgccgcgcgccagcaaaaaggctttggcgcaatgttgagttttgaactggatggcgatgagcagacgctgcgtcgtttcctgggcgggctgagcttgtttacgctggcggaaagtttagggggagtggaaagtttaatctctcacgccgcaaccatgacacatgcaggcatggcaccagaagcgcgtgctgccgccgggatctccgagacgctgctgcgtatctccaccggtattgaagatggcgaagatttaattgccgacctggaaaatggcttccgggctgcaaacaaggggtaaaaatgagtgtgattgcgcaggcaggggcgaaaggtcgtcagctgcataaatttggtggcagtagtctggctgatgtgaagtgttatttgcgtgtcgcgggcattatggcggagtactctcagcctgacgatatgatggtggtttccgccgccggtagcaccactaaccagttgattaactggttgaaactaagccagaccgatcgtctctctgcgcatcaggttcaacaaacgctgcgtcgctatcagtgcgatctgattagcggtctgctacccgctgaagaagccgatagcctcattagcgcttttgtcagcgaccttgagcgcctggcggcgctgctcgacagcggtattaacgacgcagtgtatgcggaagtggtgggccacggggaagtatggagcgcacgtctgatgtctgcggtacttaatcaacaagggctgccagcggcctggcttgatgcccgcgagtttttacgcgctgaacgcgccgcacaaccgcaggttgatgaagggctttcttacccgttgctgcaatagctgctggtgcaacatccgggcaaacgtctggtggtgaccggatttatcagccgcaacaacgccggtgaaacggtgctgctggggcgtaacggttccgactattccgcgacacaaatcggtgcgctggcgggtgtttctcgcgtaaccatctggagcgacgtcgccggggtatacagtgccgacccgcgtaaagtgaaagatgcctgcctgctgccgttgctgcgtctggatgaggccagcgaactggcgcgcctggcggctcccgttcttcacgcccgtactttacagccggtttctggcagcgaaatcgacctgcaactgcgctgtagctacacgccggatcaaggttccacacgcattgaacgcgtgctggcctccggtactggtgcgcgtattgtcaccagccacgatgatgtctgtttgattgagtttcaggtgcccgccagtcaggatttcaaactggcgcataaagagatcgaccaaatcctgaaacgcgcgcaggtacgcccgctggcggttggcgtacataacgatcgccagttgctgcaattttgctacaccagtgaagtggccgacagtgcgctgaaaaacctcgacgaagcgggattacctggcgaactgcgcctgcgtcaggggctggcgctggtggcgatggtcggtgcaggcgtcacccgtaacccgctgcattgccaccgcttctggcagcaactgaaaggccagccggtcgaatttacctggcagtccgatgacggcatcagcctggtggcagtactgcgcaccggcccgaccgaaagcctgattcaggggctgcatcagtccgtcttccgcgcagaaaaacgcatcggcctggtattgttcggtaagggcaatatcggttcccgttggctggaactgttcgcccgtgagcagagcacgcttagcgcacgtaccggctttgagtttgtgctggcaggtgtggtggacagccgccgcagcctgttgagctatgacgggctggacgccagccgcgcgttagccttcttcaacgatgaagcggttgagcaggatgaagagagcttgttcctgtggatgcgcgcccatccgtatgatgatttagtggtgctggacgttaccgccagccagcagcttgctgatcagtatcttgatttcgccagccacggtttccacgttatcagcgccaacaaactggcgggagccagcgacagcaataaatatcgccagatccacgacgccttcgaaaaaaccgggcgtcactggctgtacaatgccaccgtcggtgcgggcttgccgatcaaccacaccgtgcgcgatctgatcgacagcggcgatactattttgagcatcagcgggatcttctccggcacgctctcctggctgttcctgcaattcgacggtagcgtgccgtttaccgagctggtggatcaggcgtggcagcagggcttaaccgaacctgacccgcgtgacgatctctctggcaaagacgtgatgcgcaagctggtgattctggcgcgtgaagcaggttacaacatcgaaccggatcaggtacgtgtggaaagcctggtgcctgctcattgcgaaggcggcagcatcgaccatttctttgaaaatggcgatgaactgaacgagcagatggtgcaacggctggaagcggcccgcgaaatggggctggtgctgcgctacgtggcgcgtttcgatgccaacggtaaagcgcgtgtaggcgtggaagcggtgcgtgaagatcatccgttggcaagtctgctgccgtgcgataacgtctttgccatcgaaagccgctggtatcgcgataaccctctggtgatccgcggacctggcgctgggcgcgacgtcaccgccggggcgattcagagcgatatcaaccggctggcacagttgttgtaatttcagaaatttaataatgcccggtactcatgttttcgggtttatggtttctaatgaaatatattgaattatcataggattaggccggattaagcgtttacgacgaatccggcaagaagcaataagtacatggttagtttatatttgcagtccggtttgctttgcataccggattttctttttcttaccatcctgaagttttttcatcttccctgatttttcctcaccatcattggtcatttttcggttgacgcccttcggcttttccttcatctttacatctggacgtctaaacggatagatgtgcacaacacaacatataactacaagcgattgatgaggtaaggtatgagcttttttcacgccagccagcgggatgccctgaatcagagcctggcagaagtccaggggcagattaacgttagcttcgagtttttcccgccgcgtaccagtgaaatggagcagaccctgtggaactccatcgatcgccttagcagcctgaaaccgaagtttgtaagcgtgacctatggcgcgaactccggcgagcgcgaccgtacgcacagcattattaaaggcattaaagatcgcactggtctggaagcggcaccgcatcttacttgcattgatgcgacgcccgacgagctgcgcaccattgcacgcgactactggaataacggtattcgtcatatcgtggcgctgcgtggcgatctgccgccgggaagtggtaagccagaaatgtatgcttctgacctggtgacgctgttaaaagaagtggcagatttcgatatctccgtggcggcgtatccggaagttcacccggaagcaaaaagcgctcaggcggatttgcttaatctgaaacgcaaagtggatgccggagccaaccgcgcgattactcagttcttcttcgatgtcgaaagctacctgcgttttcgtgaccgctgtgtaagcgcgggcattgatgtggaaattattccgggaattttgccggtatctaactttaaacaggcgaagaaatttgccgatatgaccaacgtgcgtattccggcgtggatggcgcaaatgttcgacggtctggatgatgatgccgaaacccgcaaactggttggcgcgaatattgccatggatatggtgaagattttaagccgtgaaggagtgaaagatttccacttctatacgcttaaccgtgctgaaatgagttacgcgatttgccatacgctgggggttcgacctggtttataaatagtgtggcttttgtgaaaatcacacagtgatcacaaattttaaacagagcacaaaatgctgcctcgaaatgagggcgggaaaataaggttatcagccttgttttctccctcattacttgaaggatatgaagctaaaacccttttttataaagcatttgtccgaattcggacataatcaaaaaagcttaattaagatcaatttgatctacatctctttaaccaacaatatgtaagatctcaactatcgcatccgtggattaattcaattataacttctctctaacgctgtgtatcgtaacggtaacactgtagaggggagcacattgatgagcacgagtgacgatatccataacaccacagccactggcaaatgcccgttccatcagggcggtcacgaccagagtgcgggggcgggcacaaccactcgcgactggtggccaaatcaacttcgtgttgacctgttaaaccaacattctaatcgttctaacccactgggtgaggactttgactaccgcaaagaattcagcaaattagattactacggcctgaaaaaagatctgaaagccctgttgacagaatctcaaccgtggtggccagccgactggggcagttacgccggtctgtttattcgtatggcctggcacggcgcggggacttaccgtagtatcgatggacgcggtggcgcgggtcgtggtcagcaacgttttgcaccgctgaactcctggccggataacgtaagcctcgataaagcgcgtcgcctgttgtggccaatcaaacagaaatatggtcagaaaatctcctgggccgacctgtttatcctcgcgggtaacgtggcgctagaaaactccggcttccgtaccttcggttttggtgccggtcgtgaagacgtctgggaaccggatctggatgttaactggggtgatgaaaaagcctggctgactcaccgtcatccggaagcgctggcgaaagcaccgctgggtgcaaccgagatgggtctgatttacgttaacccggaaggcccggatcacagcggcgaaccgctttctgcggcagcagctatccgcgcgaccttcggcaacatgggcatgaacgacgaagaaaccgtggcgctgattgcgggtggtcatacgctgggtaaaacccacggtgccggtccgacaagtaatgtaggtcctgatccagaagctgcaccgattgaagaacaaggtttaggttgggcgagcacttacggcagcggcgttggcgcagatgccattacctctggtctggaagtagtctggacccagacgccgacccagtggagcaactatttcttcgagaacctgttcaagtatgagtgggtacagacccgcagcccggctggcgcaatccagttcgaagcggtagacgcaccggaaattatcccggatccgtttgatccgagcaagaaacgtaaaccgacaatgctggtgaccgacctgacgctgcgttttgatcctgagttcgagaagatctctcgtcgtttcctcaacgatccgcaggcgttcaacgaagcctttgcccgtgcctggttcaaactgacgcacagggatatggggccgaaatctcgctacatcgggccggaagtgccgaaagaagatctgatctggcaagatccgctgccgcagccgatctacaacccgaccgagcaggacattatcgatctgaaattcgcgattgcggattctggtctgtctgttagtgagctggtaagcgtggcctgggcatctgcttctaccttccgtggtggcgacaaacgcggtggtgccaacggtgcgcgtctggcattaatgccgcagcgcgactgggatgtgaacgccgcagccgttcgtgctctgcctgttctggagaaaatccagaaagagtctggtaaagccagcctggcggatatcatagtgctggctggtgtggttggtgttgagaaagccgcaagcgccgcaggtttgagcattcatgtaccgtttgcgccgggtcgcgttgatgcgcgtcaggatcagactgacattgagatgtttgagctgctggagccaattgctgacggtttccgtaactatcgcgctcgtctggacgtttccaccaccgagagtctgctgatcgacaaagcacagcaactgacgctgaccgcgccggaaatgactgcgctggtgggcggcatgcgtgtactgggtgccaacttcgatggcagcaaaaacggcgtcttcactgaccgcgttggcgtattgagcaatgacttcttcgtgaacttgctggatatgcgttacgagtggaaagcgaccgacgaaagcaaagagctgttcgaaggccgtgaccgtgaaaccggcgaagtgaaatttacggccagccgtgcggatctggtgtttggttctaactccgtcctgcgtgcggtggcggaagtttacgccagtagcgatgcccacgagaagtttgttaaagacttcgtggcggcatgggtgaaagtgatgaacctcgaccgtttcgacctgctgtaatctgaccccgttcagcggctgcttgctggcagtcgctgaacgttctttaccagcgtatagtgggcgaacgaaaactacacactggatctctcatgtctgccgcaggaaagagcaacccactggcaatcagtggcctggttgtgctcacacttatctggagttatagctggattttcatgaagcaagtcaccagttacatcggtgccttcgactttaccgccttacgctgcattttcggcgctctcgttttattcatcgtccttttattacgtggtcgcggaatgcgcccgacaccgtttaaatacaccttagccattgccctgttacaaacctgcgggatggttggtctggcgcagtgggcgttggtcagcggaggtgcggggaaggtggcgatcctgagctataccatgccgttctgggtggtgattttcgccgcgttgtttctcggtgaacgcctgcgacgtgggcaatatttcgcgattctgattgccgctttcggcttatttttggtgttgcagccgtggcaactcgatttctctagcatgaaaagtgccatgctggcaatcctctccggcgtcagttggggggcgagcgcgattgttgctaaacgtctgtatgcccgtcatccgcgcgtggatttattgagcttaacatcctggcagatgctgtatgcggcgctggtgatgagtgtggtcgctttactggtgccgcaacgtgaaattgactggcagcccaccgtgttctgggcgctggcctacagtgcgattctggcgacggcactggcgtggagcttatggttgtttgtattgaaaaacttgcctgccagtattgccagcttaagcacactggccgttcccgtttgcggcgtactcttttcctggtggctgctcggcgagaatccgggggccgttgaaggtagcggtattgtgctgattgtgctggcactggcgctggtgagccgtaagaaaaaagaagccgtcagtgtaaaaaggatctgaattttttcttcatgtggggcgatctcttatttaacaaaataacgataatgccccaccatccgccagttaaacagcacatcttcttcctgcgcgcctgcgccaatgttatgtatcaccagcggcgtaccgtcgcgggcgaagccatcactaaccaccccaatatgtgccagcccgttatccagtcgccaggagacaatatcgcccgcttgatagtcactggggttcttgctggtggggcgtgttttatcatggcggctaaaccaggtttccagattaggcacccgacggtgatcgatgttgctgtccgggcgctttaacttccatttttgcgggtactcagcaaaattcttcgccatatcttcgtgaaccagtttctgcaaatcgaccttctggctgcgcaatgcgcggatcaccacatcggaacatacaccgcgttcttgcggaacatcaccgccaggataagtaagctgcacatacgccggatcgtaaaatagcgtgctgccaatttgctgtctggcaccgtctgcgatggcaaggttggtattggcctggatttgtaccacggttggtggaacggcgggagattttaaggagtggctggtaaatgccgttagcaggctgagcagcgccagactagctttcatctggttcgtccgtgaaaataagagtcacagattcgaccttccgggctaacgattgttctgtagagaaaatgtccagaagcggataaaaaattcctgaacaacgtgggagtttcagattactggcacagagtgccggatgcggagtgaacgccttatccggcctacaaaagcacgcaaattcaatatattgcagagattgcgtaggcctgataagcgtagcgcatcaggcaattttgcgttcaaactcccggacaagccgggagtttggagtaggttattcccactcttgcaggaaacgctgaccgtactggtcggctaccagcagagcggcgtaaacctgatctggcgtcgcgccgccaggcatgttgtgaatggtttcaccttctgcacatgccgcttctgccacaattcgcattttcgccgggacatcttctttaatatccagttgagcgagagttattggcaaacctaccgcatggctaagggcagctacggtttcgatttcctccaccggcgcattttccagaaccagctgcgtcagcgtaccgaatgccactttttcaccgtgataatagtgatgcgcgtccgggatagcggtcaggccgttatgcactgcgtgcgccgcagccagaccaccactttcaaaaccaacaccgctcaaataggtgttcgcttcaatcacgcgctccagcgccggagtcactacatgctgttcggcagcaagcatcgctttttcgccttcttccagcagggtgttgtagcacagttcagccagtgccagcgcagcctgggtgcacttgccgcccgccatggtggtcgcgccgctacgagagcaggcacgcgcttcaaaccaggttgccagcgcatcgccgatacccgccgctaacagacgtgcaggtgcgccagcgacgattttggtgtcgacaatgaccatattcgggttatttggcaacagcagatagcggtcaaactcaccctcatcggtgtagataacagacaatgcgctgcacggtgcatcggtagaggcgatagtcggtgcgatcgctaccggaacacccatgaaatgtgccagtgctttggcagtatcgagggtttttccgccaccgataccgagaattgcgccacactgcgcagtctccgcgatgccacgcagacggtcgatctcattttggctacattcaccgccaaacggcgcaatttctactaccagtccagcatctttaaagcttttctcgacagtggattgagcaaaacctaaaacaaatttgtcacccaccactaaccagcgttctgccagcggcttcaggtattcgcccagacgattaatcacatcagcgccctggatgtatttacccggactttgaataatgcggtccataattgctcctttagagatgagtagtgccaaatgcggcattccagtcgtgttcgaacttctctatagcactctctaccgcaggggtgttgagcatttgttgcgctacatctaagggcagggtgatggattcacatcctgccagtaaacagtccagcgcctgacgcggcgttttaaagctggctgccagcaccatgctttctggcgcgtgcatttctaacagcgtttgcagctcctgaaccgtacgaatgccgtctccgccctgggcatctacgcggttaacatacggagcaacgtattttgcccctgccagtgcggctaataacccttgtgcggcgctatatacagcagtgccaagtgtagtaataccctcttttttcagtattttaattgctgccagaccttcggaagtcaccgggattttcaccacaatacccggaatagcgtcgcgcaggcgcttcgcttcttccaccatcccctgcgcgtcgcggctcatggtctgagcaaacagaatgccctcatcaccaatcgctttttgcagacgcggcagcacttcccatatggactccttgctggcagcgataatgctcgggttagttgtcaccccggcaatggggaatatgcgtgccagacgttcgacttctgcgacgttagcggtgtccagatacagttccatgatgtttccttttacagttccagttcatgttgcagcaggctggcgatagcgtcggcagaggcggcgttaaccagcgcgttacggaattcttcgtgcatgatgcggcgagcgaggcggctgaaaatgcgcatatgctgatcgcccgcagcgtgtttgttcagggttaacataatgatgaattgcgcttcatcatcgccccagcgcaccggcgcttgcagacgcgccacgctgatggtggattgctcaatgtgttcacttttgctgtgtggaatggcaaaactaaagcccagaccggtagagaaaacggcctcgcgcgcccacaagtcggcttccagtttacgcggatagcggcagcggcccgccagcagcaggttatcggtcatgcctttgagcacttcttctttgctgcgccagtcgctttccagtgtgatgcactcggcggtgaccagcggtgcgtcttgttgggtcatgcggaattgcgccagcaggtgttctacttccaggctagtacggcaggccattgcctggttgagcaacttgcggcactcacggctatcaagttgcgccatccgagctttcgccgccggaatacttggtgcgctcatgctgagttcatccagccctaagccgaccagcaacggcagcacggaacctttcgctcccagctcaccgcacagaccaatccatttgccctggcgatgcaccgcttgcacggcgtaatcgagcgcccgcaagaatgccggattcaggctgttgtagtgacgagtaaccttagcgttatcgcgatccaccgccagcagatactgcgtcaggtcattactaccaatactaaagaaatcaatctcttcgcagcattgatcgatgatgaacatcacgctcggcacttccagcatgatgccgagctggattttctcatcaaacggaatgtgttcgttacgtagttgctgtttggcttccgccagtttttctttcacccataagatctcttccatactggagatcatcgggatcatgattttcaggctgccgtgagcggaggcgcggaggatgctccgtagctgcgtggtaaacaagctcgcgtactcttcataaatacgcacggcgcgataaccgaggaacgggtttgcctctgcgggaatgttcagataatcaacgggtttgtcgccgccaatgtccatagtgcgcacaataatgctgcgtccgttggcggattccagcgcctgacaaaaaatgttgtacaactcgctttcgcccggtgcgctggtgcgatccatatagagcatttcagtgcggaacaaaccaacgccttccgcaccattgccgaatgcggcctgcgcttccacggagtgagcgatgttagcggcaatttcaatgcggataccgtcagcggtacgggcttgttgggtcagccagacacgctgttgctcacgcagggcgtcctgtacgcgggcttcttgctgataataacgagctacggcttcccctggctcaaccacaatcgccccggcgttgccgtcgatataaatcgtttgttgctgccacggagtaagggcatcaatatccacaccaaccagcgttggaatgttgaagctacgggcaaggatcaccgtatgactggtggtgccgccgcttttgagcaacaatcctttgaggtgatttttatccagttcgaggaactggctgggggtcagttcatcagccatacaaatggcgggctgcgtcagtttgcccggtgccgggaagcgttgctcaccgtagatttgctggagtaactggaagcagacgtcgcgtacgtccagggcacgttcttgcaggtagctgctgctggaacgggaaaactcttcgcaaaagtgattcgcgctggcaacaattgcttcggcgcagcttaatccggcgctgacgcctgccagtaaatgttcgcgcagggaagtatcgccagccagggatcggtgagcttccagaatcgcgctggtagcaccgtcgctatccagcagacgaaactcaatgtttttcagtaccagcgtcaggccgttttccagtgcggattgctcggcgtcaacgcctttggctgcgggaagattacccagcgcattgagatctaaagaagagatcggcgtcagaatgccgcctgcactaccgctgcacacggtgcgggcgcggataatttgcggattcagattggtcagactaaccggcagtggttccagttcgtcagatttaacttccgccagcggcgcatcgcagtgggggaattcatcgcgcagccattggcttaaacgctggtgcgcttcctgttcgtcggccccggaaatcagtaactggcagttatcgcccgccagcgtatcggtgccaatcagcgcaagggcgcttttggcgttgcccttgcggtcagtgcgcaggttatgccactcaatttgactactaaaagtattacacagcgtttcaacgtggcttgccggacgcgcatgtacgccgttaggtagctcacaaataaattccacaatcagggccattgcctctctcccggtacggttttctgtttacaggataagagcgcacggcaacggcctgccatgtgacaaatctgccaaaagctggacaaatgtaatgtaaccgtcaatttgcgacgcgtctcacaagacgctgttttgcggcatgcttccggtttatcgcaagttatgaggcggatcgcatttttgtactgatattacaaaagtccagtaaatggcctttttatccactgtttgctccgcctgcgattgcctattgtttcctccatcaaaaatatggacatgggctttcgcaagcccgggagcagcttatgaatgagttggtgcagatcctgaaaaatacccgtcagcatttaatgacgggcgttagtcacatgattcccttcgtggtaagcggcggtattttgctggcggtttccgtcatgttgtatggcaaaggcgcagtgccggatgccgtagccgatccaaatctgaaaaaactgtttgatatcggcgttgcgggcttgacgctgatggtgcctttcctcgcagcgtacatcggttattccattgcagagcgttctgcgctggctccgtgcgctatcggtgcctgggttggtaacagctttggtgcgggcttctttggtgcactgatcgccgggattatcggcggcatcgtggtgcattacctgaagaaaattccggtgcataaagttctgcgcagcgtgatgcctatcttcattattcctatcgtcggcacactgattaccgcaggcatcatgatgtggggcttgggcgagcctgtaggggcgttgaccaacagcctgactcagtggcttcaggggatgcagcagggcagcattgttatgctggcggtgatcatgggtctgatgctggcgttcgatatgggcggtccggttaacaaagtggcctatgccttcatgctgatttgcgttgctcagggtgtttataccgtggtggccatcgctgccgtgggtatttgtatcccgccgctggggatggggctggcgacgctgattggtcgtaaaaatttctccgcagaagagcgcgaaaccggcaaagcggcactggtgatgggctgtgttggcgttactgaaggggcgattcctttcgccgctgccgatccgctgcgtgtcattccttccatcatggtcggtagtgtttgtggtgcagtaactgcggcgctggtcggtgcgcagtgctatgcaggctggggtggtctgattgtgctgccggtggttgaaggcaagctgggttatatcgcagcagtggctgtcggagcagtggtgacggctgtttgtgtgaacgtgctgaaaagtctggcgcgtaaaaatgggtctagcactgatgaaaaagaagacgacctggatttggattttgaaattaattaattgaggaacgagccatgacgaaaattattgcagtaaccgcatgtcctagtggtgttgcccatacctatatggcagcagaggcgctggaaagtgccgcgaaagcgaaaggctgggaagtgaaagtagaaacccaggggagtattggtctggaaaatgaactgactgcggaagatgtggcgagcgctgatatggtgattctgaccaaagatatcggcatcaagtttgaagagcgttttgctggcaagaccatcgtgcgcgtcaacatcagcgatgcagtaaaacgtgctgacgccattatgagcaaaattgaagctcacctggcgcaaaccgcttaagttcttctcccgctcgcaagggcgggttcgctttcccacaggagttcctcatgacgaatcgtatctctcgcctcaaaactgcactgtttgccaatacccgtgaaatcagcctggagcgggcgctgctttataccgccagccatcggcaaaccgaaggcgaaccggtgatattgcgccgggcgaaagcaacagcgtatatccttgaacatgttgaaattagcattcgtgatgaagaactgattgccggtaaccgcaccgtaaaaccgcgcgccgggattatgagcccggaaatggacccttactggctgctgaaagagctggatcaattcccgacgcgtccgcaggaccgctttgctatcagcgaagaagataaacgtatctaccgtgaagagttgttcccgtactgggaaaaacgtagcatgaaagatttcatcaacgggcagatgacagatgaagtaaaagccgcgaccaacacgcagattttcagcatcaaccagacggataaaggccaggggcacattattattgattacccacgcctgttgaatcacgggctgggtgagctggtggcacagatgcagcaacattgtcagcaacagccggagaatcacttttatcaggccgcgttgttactgctggaagccagccagaaacacattttgcgttacgccgaactggcggaaacgatggcggcaaactgcacagatgcccagcgtcgcgaagagctgctgactattgcagagatctcccgccataacgcgcaacataagccgcagacgttctggcaggcgtgccagttattctggtacatgaacatcattctgcaatacgaatccaacgccagtagcctaagcttggggcgcttcgaccagtatatgttgccgttctatcagacaagtttaacccagggcgaagatgcggcgttcctgaaagaactgctcgaatctttatgggtgaaatgcaacgacatcgtgctgttgcgctccaccagtagcgcgcgttatttcgccggtttcccgaccggctataccgcactgctcggcgggttaaccgagaacggacgtagcgcggtgaacgtgcttagcttcctttgccttgacgcctatcaaagcgtgcaattaccgcaaccgaacctcggcgtgcgcactaacgccttgatcgacacgccgttcctgatgaaaaccgccgaaaccattcgcttcggtaccggtattccgcaaatctttaacgatgaagtggtggtgccagcgttcctcaaccgtggcgttagcctggaagatgcgcgcgactattccgtagtgggctgtgtggaattatctattcccggcagaacctacggcttgcatgacatcgcgatgtttaatctgctgaaagtgatggaaatctgcctgcatgaaaatgaaggcaatgctgcgctgacttatgaaggtttactggagcagatccgcgccaagatcagccactacatcaccctgatggttgagggcagcaatatttgtgatatcggccatcgcgactgggcacctgtaccgctgctcagtagctttatcagcgattgtctggaaaaaggccgcgatattaccgatggcggcgcgcgttataacttctccggcgtacaggggatcggtatcgccaacctgagcgattctctccatgcgttgaaagggatggtttttgagcaacagcgtttaagttttgacgaattgctgagcgtattaaaagccaacttcgcaacgccagaaggcgaaaaagtccgcgctcgcttaattaaccgcttcgagaaatacggtaacgatatcgacgaggtggataacatcagcgccgaactgttgcgccactactgcaaagaagtggaaaaataccagaacccgcgcggcggctacttcacgccgggaagctataccgtttctgctcacgtcccgttgggaagcgtggttggcgcgacgccagacggtcgttttgccggagaacagctggcagacggcggcttgagtcccatgctgggccaggacgcacaagggccaacagcggtactgaagagtgtcagtaagctcgataacacgctgctgtctaacggtacgttgctgaacgtgaaattcactccggcgaccctggaaggtgaagcaggattacgcaaactggccgacttcttacgggcgtttacccagcttaagttacaacatattcagtttaacgtggtgaacgccgacacgttgcgggaagcgcaacagcgcccacaagattatgccgggctggtggtgcgcgttgccggatacagcgccttctttgtcgaactgagcaaggagatccaggatgacatcatccgccggacagcgcatcagctgtaattaaactgtcgaaggagatccaggatgacaagttccgccggacagcgcatcagctgtaacgttgtggaaacgcgccgcgatgatgtggcgcgcattttcaacattcagcgttatagtctgaatgacggcgagggcattcgtacggtggtcttttttaaaggctgtccgcatctttgcccgtggtgtgctaatccggagagcatctccggcaaaatccagacggtacgcagagaggcgaaatgtctgcactgtgcgaaatgtttgcgtgatgcggatgaatgcccctccggggcgtttgaacggattggtcgcgatatcagccttgacgctctggaacgggaagtgatgaaagatgacattttctttcgcacgtccggcggcggcgtcacgctttctggcggcgaagtgttaatgcaggcggagtttgctacccgttttttacagcgactgcggctgtggggtgtgagttgcgccattgaaactgccggagacgcaccagccagcaagctattaccgctggcgaaattgtgcgatgaagtgttgttcgatttaaaaattatggacgcgactcaggcgcgggatgtggtgaagatgaacctgccacgcgtgctggagaatctgcgtttgctggtgagtgagggcgtcaacgtgatcccgcgtttaccgctgatccctggtttcacgctcagccgggagaatatgcagcaggcgctggatgtactgatcccgctgaatatcaggcagatccatctgttaccgtttcatcagtacggcgaaccgaaataccgcctgctggggaaaacatggagcatgaaagaggtgcctgcgccgagcagtgctgatgtggcaacgatgcgcgaaatggcagaacgggccggacttcaggttaccgtgggaggttaaaatggcatacctggtggcagtaaccgcctgcgtaagcggcgtggcgcatacttatatggcggcggaacggctggaaaagttgtgcctgttagagaagtggggagtcagcattgaaactcagggcgcgctgggaacggagaatcgtttagcggatgaggatatccgccgggcggatgttgctctgttgattacggatatcgagcttgccggtgccgagcgatttgaacattgccgctatgtgcaatgcagcatctacgcattcctgcgtgagccgcagcgggtaatgagcgcggtgcgcaaagtgctttctgcgccgcagcaaacccatcttattctggagtaattattctggagtagtcggtttttctgtcagttggctgtggtactgccggcgatattcgctcgggctgcgttcggtgtttttacgaaacagacggcagaagtagttgctgtcgacaaagccgcaggcgtgcgccacttcttttaccttcaggtcatagcctttcaataacgtcttagcgtgctccagtcgcgtgtgattcaggtattcgttaaaaccaatggcccccgttttttgaaacaggtggctgaggtaatttgggctaatataaaacgcctgtgcaacagattcgcgggtaagcgcggaggcatagcgttcgtcgatataatcgcgaatagcttcaaatagtgcctggctgcgactggcggtctggatttggctgccaagcaaatcgcggcagtggctaagcaggctggcgacgataagccttgccgtttgctgctcctgcggctgcatttgcatttcattgagcgtttgtagcagaaaagaacctatgcgtgggccgcgtcgggcgacgtgttgcttcgccagattttgatattgtttgccatcccattgcacgacgctgaagccgagttgctgtttgccaaacagcacgctaaaggtagtagcgggggcttgccattgtggaaaattccagccaccagcaggaacgtacagcacatcgccgggaactaacgttgctccagcgccggtatcaacaaactcaccttccagcacaatttccagccgtggaaaatcgacctgatacgcaagatcgggcaccgggccgttactgctggcaaagtaaatctggcgcagggacagcgggccgttgatcaggcgggagagcagatagctgacgtcgtgatacatgttattcccttaggtatgtagacgggaaaacagtaactggcattattaaaaaaggccacctgaaaagtgtggcctgaggggagttcgatgtaaacattgcggcagttgtattgccggatgtggcgtaaacgccttatccagcctaccgccgcgatctgtaggccggataagacgcgtcaagcgtcgcatccggcaaatagcgcctggctgataattactgattacccacctgatcgccatagggcagtgtgtcgtaatcgatcagtgcgtttttcttatacgggttaccaatccagcgggtagtttctttgaactgcggattcaccacactacgggttggatcgtaaccgtcgtaagataagcccgccaaatcactccaggtgtggatcagttccgccaggctgtatttacgatcaacatcctggctgaaatcacggggatgagtcgcttgccatttttcactcgtccacagcaggaacggaatggtgtacatatgacgcgtcgggttgtcctcattacgcccctgagttttgtgcggcggcgtgtcgtaaacctcttcaccgtggtcagagaaataaaccaggaaaccgttcgggtttgctgctttaaagtctttaatcaggctggcaaccacatgatcgttatacaggttagcgttgtcataatcgttataactctccagctcttccgcgtttaatcccggcggaacatgatcggtattgccatcaaacttgccctgattttccgggtagcggtatttgtatttgatatgcgtacccagcagatgaacaatgatcagtttcttcggcgcagggtcattcagcacttcctggaacggcttcagcacgttggtgtcgtattcacgcgcactctgcgtacgttgctggttcatgtagtactgcttgtcggtctggcggctaaataccgtcagcatggtattgcgggcggtcatcgtctgctggttggtgatccagaaggttttataacccgcctgtttcatcatgttcatcaggctcggctgcgtcagatacagatccgggttcttttcattggcaaaggtcagcgcctgttgcaggatttcaatggtgtacggacgagacgtaactacgttattaaacacggtcagattcggatcggttttatgcagcgcatccagctccggcgtggtttcacgcggataaccgtacagactcatgcgtccgcgctgggtgctctcgccaatcaccagcactaaagtgcgcggttcgttaccgctttcatctttgaaattagccagtggcggcaaggcattattttcattcagtaactttgttaggctgtttagttgctgacgatactgataatagccggtcaggaattgccacggtgcggcaggctccatacggctggccaggttatccaacgttttctcaaacggcttgtttttgataaacgtattcatggcgatcggatgcagaatcaagccataaagcagggcaaaagagacaacataacgccacggctttggaatatagaccgggcgcaggcgtgtccacagcagaactgccaccgccgtataggccagcgcgataagcacaattttcaggctgaaatactggcttaaatactcgctggcttcgttggtgttggtttcgaacatcacaaacagaacgctctggctgaactcctgaccgtagatgacgtagtagcacagcgccgccagagaggccgcccatagcaccacgccgattactgcggcaataattttaatccgcttcggaaagaggaataccgggatcaaccacaggctactgaataacaggctgtcgcgaatgccgttagtgccactataaccactgatgtaaataatggcctgtagcagagtagagaaaaaccaaaagtagagcagtgcccaacccagggctttccagctaaaaagaggtttagcctggacttctgtggaatgcatagtaagaacctgtcttgaaaaaatatcgccgaatgtaacgacaattccttaaggatatctgaaggtatattcagaatttgaataaaatgcagacagaaatatattgaaaacgagggtgttagaacagaagtatttcagaaaaccctcgcgcaaaagcacgagggtttgcagaagaggaagattagccggtattacgcatacctgccgcaatcccggcaatagtgaccattaacgcttgttcgacgcgaggatccggttcctggccttctttttctgcctggcgggagcggtgcagcaactcggcctgcaatacgttcagcgggtcggtgtaaatattccgtagctgaatagactctgcaatccacggcagatcggccatcagatgggaatcgttggcaatcgccagcaccactttgatgtcttcttcttgcaggttgcgtaactctttacctaacggccacagtgctttgtctaccaggcgttggtcatagtattccgccagccacaggtctgctttggcgaagaccatctccagcatgccgagacgcgtgctgaagaatggccaatcgcggcacatagcctccagctcgctctgtttgccgtcttcgaccactttttgcagcgccgtacctgcacccagccaggcggggagcatcagacggttttgcgtccaggcgaagatccacggaatggcgcgtagactctcgacgccgccggttgggcgacgtttcgccggacgactacccaacggcagtttgcccagttcttgttccggcgtagcggagcggaagtaaggcacaaaatctttgttttcacgtacgtagccgcggtagacatcgcaggagatgacactcagttcatccataatgcgacgccagctctctttcggctccggcggtggcagcaggttggcttccagaatcgccccggtataaaggctcaggctgctgacggtgatttctggcagaccatatttaaagcggatcatctcgccctgttcggttacgcgcaggccgcctttcaggcttcctggcggttgactcagcagcgccgcatgagcaggtgcgccgccgcgaccaatggaaccgccgcgaccgtggaacaacgtcagctcaatacccgctttttcgcaggttttgattaatgcatcctgtgcctgatattgcgcccaggaagctgccatcactcccgcatcttttgcactgtcggaatagccaatcatcaccatctgtttgccctgaatcaggccacgataccagtcaatattgagcagctgggtcatgacatcgttggcgttgttcagatcatcgagggtttcaaacagcggagcaaccggcatcgcaaacccgatacccgcttctttcagcagcaggtggacagccagtacgtcggacggcgttttcgccatgctgatcacgtaggcggcaatggagccttgcggtgcttcggcaatcacctggcaggtatcgagcacttcgcgcgtttcggcgcttggttgccagttgcgcggcagaagcggacgtttggagttcagttcgcggatcaggaacgcctgtttgtcggcctcactccagctttcgtagtcgccgataccgaggtagcgggtcagctcgcccagcgcttcggtatgacgcgtgctctcctgacggatatcaatacggaccagcggtacgccgaaacatttcacgcggcgcagggtgtcgagcagatcgccgttggcgataatacccatgccacacgcctgaagactctggtagcaagcgtagagcggttcccacagttcttcgttttgtgtcagcaggccttctggttttggcagttcttcgcctttcaggcgcgcttccagccatgcctgtgtcgccatcaggcgagaacgcaggtttttcatcagatagcgatacggttctgcggcaccttcttcgccaaccagcgccagcagttcaggggtcgcttcaaccatgctcagttcagaaaccagcacctgaatatctttcaggaacaaatcggtggctttccagcggctgagtagcaggacgtggcgggtgatatcggcagtgacgttcgggttgccgtcgcggtcgccgcccatccagctagtaaaacggaccggaacaaattcgacgggcagtttgtagccgaggttctcttccagttgttcgttcagttcgcgcaggtaatttggtacgccttgccacaggctgttttccactacggcaaagccccatttggcttcatctaccgggcttggacgcagcttacggatttcatcggtatgccaactctgggcgatcaactggcgcaggcgacgcatcagctggttgtgttcgtagtcagcgatatctttgttatcgagctgttttaaacaggcgttcacttccaccattttgtggatcagtgtacgacgggtaatttcggttgggtgagccgtgaggaccagttccaggctcaggctttccactgcttttttgatggtgtcttcgctcagttccggctggtttttcagtttacgcagggtgcgggcgatcacttccgggttgctggcagcttcgcctttcgggctaatgctgtggtattgctcggcggtgttggccaggttcaggaactgactaaacgcacgcgcaacgggcagcagctcgtcgttgctcaaattttgtaaggtggtgagcaactcctggcggttagcatcattgccagcgcgactagatttgctcaacttacggatagtttctacgcgttcaagaatgtgttctcccaacgcatccttgatggtttctcccagcactttgccgagcatactgacattactacgcaatgcggaatattgttcgttcatattaccccagacaccccatcttatcgtttgatagccctgtatccttcacgtcgcattggcgcgaatatgctcgggctttgcttttcgtcgtcttttataaagccacgtaaaagcggtgacgtcaaatgctgcgaaatcgcttcagcaaacgaataaatagcaggaatttacgtcattaaattcacgacgctttaaataagcgtaacttatggaaatgttaaaaaatcgccccaagtaacaccaaaggtgtaggtcggataagatgcgcaagtatcgcatccgacattattgcggcactggagtttggcaacagtgccggatgcggcgcgagcgccttatccggcctacagttgggcatcgtttgagtcactgtcggtcggataagatgcgcaagtatcgcatccgacattattgcggcactggagtttggcaacagtgccggatgcggcgcgagcgccttatccggcctacggttgggcatcgtttgagtcactgtaggtcggataagatgcgcaagcatcgcatccgacattattgcggcactggagtttggcaacagcgccggatgcggcgcgagcgccttatccggcctacgttttaatgccagcaaaaatggtgaattacctgggttatcagttcgcgggtgggcttgataaaccgtgtttccagatattcatcaggttgatgagcctgattaatactgccaggccccaacaccagcgtcgggcataacgtttgaataaacggcgcttcggtacagtagttcaccacttcggtttttgctccgagcaatttctcaaccacttcaaccagttgatgattcggtgggcattcatagccagggatcggcggatgcagctcgtcgaccgtcagacgacccggccagcgttcgctcaccggagccaatgcatcgttgagcaaaccattaagttcattgagtgtcatgccaggcagcggacgaatatccatatgcaactcacagcaagcgcaaatacggttagaagcgtcgccaccgtgaatatgcccgaggttgagcgtagggtatggcacggtaaacgcttcgtagtgataacgttctttcaggttatcgcgcaattgcaaaatatgcccgatggcgtcgtgcattagttcgatagcgttaactccgcgtgctggatcgctggagtgcccgctctggccctgaatacggatggcgttagagatatgacctttatgtgcgcgtaccggttgtagactcgtcggttcgccaatgatggcgcaatccgggcgcagggcggtagtttcggcaaaataacgcgctccggccatactggtttcttcatcagcagtcgccagaatgtagagcggttttttcagtttcgtgacgtcgacatcgcgtagcgcatcaaggataaacgcaaaaaagcctttcatgtcggcggtgcctaagccgtaaagcttgccgtcatgctccgtcagtgtaaacggatcgcgcgtccagcgaccgtcatcaaatggcaccgtatcggtatgccccgccagcaacaagccgccagccccctgtccgatacttgccagcatattgaatttgttgcgagttcctggaacaggctgcacttccacattgaagcccaaatctttaaaccagtccgccagcagagtgattaaatctgcattgctttgatcgagtgcctcttccgtggcgcttatactaggtgtggcaatcagagcgcggtaaatctcgataaatggcggtaatttgtttttcattgttgacacacctctggtcatgatagtatcaatattcatgcagtatttatgaataaaaatacactaacgttgagcgtaataaaacccaccagccgtaaggtgaatgttttacgtttaacctggcaaccagacataagaaggtgaatagccccgatgttgaatacgctgattgtgggtgccagcggctacgctggcgcagagctagtgacctatgtaaatcgccatccgcatatgaacataaccgctttgactgttagtgcgcaaagcaatgatgcgggaaagttaatctccgatttgcatccgcagctaaaaggcatcgttgatctgccgttgcagccgatgagcgatatcagcgagtttagcccaggggtggacgtagtgtttctcgccaccgcccatgaagttagccacgatttagcgccgcagtttcttgaagcgggctgcgtggtgttcgacctttccggcgcgtttcgtgttaacgacgccaccttctatgaaaaatattacggctttacccatcaatacccggaactgttggaacaggcagcctacggtctggcggagtggtgcggtaataaattaaaagaagcgaatttgattgcggtgccgggctgttatccgacggcggcacagctggcgctgaaaccgttgattgatgccgatcttcttgacctcaatcagtggccggtgatcaacgccaccagcggcgtgagcggtgcagggcgtaaagcggccattagtaacagcttttgtgaagttagcctgcaaccgtatggcgtctttactcatcgccatcaaccagagatcgccacacacctcggtgctgacgttatcttcaccccacatctgggcaatttcccgcgcggcattctcgaaaccattacctgccgcctgaaaagcggtgtgacccaggcgcaagtcgcgcaagtgttacagcaggcgtatgcccataaaccgctggtgcggctgtatgacaaaggcgttccggcgctgaaaaatgtcgttgggctgccattttgcgatatcgggtttgccgttcagggcgagcatctgattattgtggcgaccgaagacaacttactgaaaggcgcggcggcacaagcggtacagtgcgccaatattcgtttcggctatgcggaaacgcagtctcttatttaagggtgcaatgatgaatccattaattatcaaactgggcggcgtactgctggatagtgaagaggcgctggaacgtctgtttagcgcactggtgaattatcgtgagagtcatcagcgtccgctggtgattgtgcacggcggcggttgcgtggtggatgagctgatgaaagggctgaatctgccggtgaaaaagaaaaacggcctgcgggtgacgcctgctgatcagatagacattatcaccggagcactggcgggaacggcaaataaaaccctgttggcatgggcgaagaaacatcagattgcggccgtaggtttgtttctcggtgacggcgacagcgtcaaagtgacccagcttgatgaagagttaggtcatgttggactggcgcagccaggtagccctaagcttatcaactccttgctggagaacggttatctgccggtggtcagctccattggcgtaacagacgaagggcaactgatgaacgtcaatgccgaccaggcggcaacggcgctggcggcaacgctgggcgcggatctgattttgctctccgacgtcagcggcattctcgacggcaaagggcaacgcattgccgaaatgaccgccgcgaaagcagaacaactgattgagcagggcattattactgacggcatgatagtgaaagtgaacgcggcgctggatgcggcccgcacgctgggccgtccggtagatatcgcctcctggcgtcatgcggagcagcttccggcactgtttaacggtatgccgatgggtacgcggattttagcttaagttttgttggccggaggcgcagctttccggcattgaatttcaaaataaggaaacagagttatggcactttggggcgggcgttttacccaggcagcagatcaacggttcaaacaattcaacgacagtctgcgctttgattaccgtctggcggagcaggatattgttggctctgtggcctggtccaaagccctggtcacggtaggcgtgttaaccgcagaagagcaggcgcaactggaagaggcgctgaacgtgttgctggaagatgttcgcgccaggccacaacaaatccttgaaagcgacgccgaagatatccatagctgggtggaaggcaaactgatcgacaaagtgggccagttaggcaaaaagctgcataccgggcgtagccgtaatgatcaggtagcgactgacctgaaactgtggtgcaaagataccgttagcgagttactgacggctaaccggcagctgcaaagcgcgctggtggaaaccgcacaaaacaatcaggacgcggtaatgccaggttacactcacctgcaacgcgcccagccggtgacgttcgcgcactggtgcctggcctatgttgagatgctggcgcgtgatgaaagccgtttgcaggatgcgcttaagcgtctggatgtcagcccgctaggctgtggcgcgctggcgggaacggcctatgaaatcgaccgtgaacagttagcaggctggctgggctttgctagcgcgacccgtaacagtctcgacagcgtttctgaccgtgaccatgtgttggaactgctttctgctgccgctatcggcatggtgcatctgagccgttttgctgaagatctgattttctttaacaccggcgaagcggggtttgtggagctttctgaccgcgtgacttccggtagtagtttaatgccgcagaagaaaaacccggatgcgctggagctgattcgcggtaaatgcggccgggtgcagggggcgttaaccggcatgatgatgacgctgaaaggtttgccgctggcttacaacaaagatatgcaggaagacaaagaaggtctgttcgacgcgctcgatacctggctggactgcctgcatatggcggcgctggtgctggacggcattcaggtgaaacgtccacgttgccaggaagcggctcagcagggttacgccaacgccaccgaactggcggattatctggtggcgaaaggcgtaccgttccgcgaggcgcaccatattgttggtgaagcggtggtggaagccattcgtcagggcaaaccgctggaagatctgccgctcagtgagttgcagaaattcagtcaggtgattgacgaagatgtctatccgattctgagcctgcaaagctgcctcgacaagcgtgcggcaaaaggcggcgtcagtccgcagcaggtggcgcaggcgattgcttttgcgcaggctcggttagggtaagaacatttatatgtataaatttgagcctggcttatcgccgggcttttttatggcaaaaaaaagcggatcctggagatccgcaaaagttcacgttggctttagttattcgagttgagaaactctcgaaacgggcagtgacttcaagggttaaaagaggtgccgctccgtttctgtgagcaattatcagtcagaatgcttgatagggataatcgttcattgctattctacctatcgccatgaactatcgtggcgatggaggatggataatgaatattcgtgatcttgagtacctggtggcattggctgaacaccgccattttcggcgtgcggcagattcctgccacgttagccagccgacgcttagcgggcaaattcgtaagctggaagatgagctgggcgtgatgttgctggagcggaccagccgtaaagtgttgttcacccaggcgggaatgctgctggtggatcaggcgcgtaccgtgctgcgtgaggtgaaagtccttaaagagatggcaagccagcagggcgagacgatgtccggaccgctgcacattggtttgattcccacagttggaccgtacctgctaccgcatattatccctatgctgcaccagacctttccaaagctggaaatgtatctgcatgaagcacagacccaccagttactggcgcaactggacagcggcaaactcgattgcgtgatcctcgcgctggtgaaagagagcgaagcattcattgaagtgccgttgtttgatgagccaatgttgctggctatctatgaagatcacccgtgggcgaaccgcgaatgcgtaccgatggccgatctggcaggggaaaaactgctgatgctggaagatggtcactgtttgcgcgatcaggcaatgggtttctgttttgaagccggggcggatgaagatacacacttccgcgcgaccagcctggaaactctgcgcaacatggtggcggcaggtagcgggatcactttactgccagcgctggctgtgccgccggagcgcaaacgcgatggggttgtttatctgccgtgcattaagccggaaccacgccgcactattggcctggtttatcgtcctggcagtccgctgcgcagccgctatgagcagctggcagaggccatccgcgcaagaatggatggccatttcgataaagttttaaaacaggcggtttaaaccgtttaacgcagctacccgataggcttccgccatcgtcgggtagttaaaggtggtgttgacgaagtactcaatagtgttgccgccacctttctgttccataatcgcctgaccgatatgaataatttcggcagcgcgctcgccaaagcagtgaatacccagaatctcttttgtttcccgatggaacaaaattttcagcgtgcccacgttcatgccgacgatttgtgcgcgtgccagatgtttaaactgggcgcggcccacttcatatggcactttcattgcggtcagctgctgttcggttttgcccacagagctgatttccgggatggtgtaaataccggtagggatatcttcaatcagatgtgcggtggcttcgccttttaccagcgcctgcgcggcaatgcgcccctggtcataggccgcgctcgccaggctcggataaccaatcacgtcgcccaccgcgtaaacgtgtggctgtgcggtctgatacatgctgttgaccttcagctgtccgcggctgtcagtttctagcccaatgttctgtaacgccaggctatcggtattaccggtgcgaccgttggcatagagcaggcagtcagctttcagttttttaccgctcttcagatgcatgatcacaccatcgtcacagccttcgatcttctcgtactcttcgttgtgacgaatcactacgccactgttccagaagtgataggagagagaatcactcatctcttgatcgagaaatgccagcaggcgatcgcgggtgttgatcagatccacttttacatccataccgcggaagatgctcgcatattcacagccgatcactccagcaccatagataagtacatggcgcggttcgtggtgcatgctgagaatactgtcgctgtcgtaaatgcgtggatgggtgaaatcaacatctgttggatgatatggacgagagccgcaggcaataacaaatttttcagcggttagtgtttcaacgctgccgtccgggcaatccagcgccaacgtatgctcgtcaacaaagcgagcgtttccctgcaatatttcacagtgattacgttcgtaaaatccctgacgcatgcgcgtttgttgattaatcacgttatcggcatggttaaggatatcggcaaaagaagagcggagcagtcgggaatggtcgctgtaaagtgggttttgattgaattctataatgcggctgacggcgtgacggagagctttgctcgggatggtgccccagtgggtgcaaccgccgccaacattttgataacgctcgataactgcgacgcgcgcaccttgcttaaccaggcccattgcagcgccttcgccgccggggccggaacctattactatggcatcgtaatcgtaggaatgtggcatggtagggcttacctgttcttatacataaaagcaacagaatggtaacattttatcgcgggtaagccaattgatccccgtcatttatctggctatatcctgagcggcctttgctttgtctgtttcttacttttgccctgacgttttattggatttttatcgacgatactctccgtttaagcggcaggtttccgctgtacgtaaaagaaccggccaaagaattgcagtaaatatgttttattgcgttaccgttcattcacaatactggagcaatccagtatgttcattctctggtatagtgccagcagtacttttggcaaggatagtgacatcgtgatgggcgtaagagcgcaacaaaaagaaaaaacccgccgtagcctggtggaagccgcatttagccaattaagtgctgaacgcagcttcgccagcctgagtttgcgtgaagtggcgcgtgaagcgggcattgctcccacctctttttatcggcatttccgcgacgtagacgaactgggtctgaccatggttgatgagagcggtttaatgctacgccaactcatgcgccaggcgcgtcagcgtatcgccaaaggcgggagtgtgatccgcaccagcgtctccacatttatggagttcatcggtaataatcctaacgccttccggttattattgcgggaacgctccggcacctccgctgcgtttcgtgccgccgttgcgcgtgaaattcagcacttcattgcggaacttgcggactatctggaactcgaaaaccatatgccgcgtgcgtttactgaagcgcaagccgaagcaatggtgacaattgtcttcagtgcgggtgccgaggcgttggacgtcggcgtcgaacaacgtcggcaattagaagagcgactggtactgcaactgcgaatgattagcaaaggggcttattactggtatcgccgtgaacaagagaaaaccgcaattattccgggaaatgtgaaggacgagtaatgaaacaagcaaatcaagatagaggtacgctgctgctggcgttagttgctggcttaagcattaatggtactttcgcagcgctgtttagctccattgtgccattttctgtattcccgattatttccctggtgctgacggtttactgcctgcatcaacgttatcttaatcgcactatgccggtaggcttgccgggtctggcagctgcctgttttattctcggcgtactgctgtacagcacggtagttcgtgcggaatatccggatatcggctctaacttcttcccggcagtactctccgtcattatggtgttctggattggcgcgaagatgcgtaaccgtaagcaggaagttgctgagtaatcggtattatgccggatgctggcgcatccggcatgggttttacttcgcggtcagtaatacgccgcactccatatggtgcgtgtaggggaactgatcaaacagagccagacgttcgaccttgtgcgtctggcttaatgtttccagattcttgcataacgtttccgggttacaggagatgtacaaaatacgcggatacgcctgcaccattttctcggtttcactgtccagaccgctgcgcggagggtcgacaaaaatggtttcgcactgataactctttaagtcgatcccttgcaggcggttaaactcgcgcacaccattcatcgcctgagtaaattcttctgccgccatacgaataatttgtacgttatcaatatggttagctgcgatgttgtattgcgcagcagcaacgctcggcttagcgatttcggtggctaatacccgatcaaaattacgcgccagcgctaaactaaagttaccgttgccgcagtacagctccagtaaatcgcctttactgcctttggttacgtccagcgcccattccagcatctgaatattcatcgccgcgttcggctgggtaaagctgttttctacctgacggtagatcatctctttccctgcgaccggcagacgttcatcgatgtaatcctgatccagctcgattttggttttcgttgcccgaccaatcagatgcacattcagattctgcgcgcgcagtgcatcgcgcagggcctccgcttcctgacgccactcatcatccagcttcttatggtatagcagggaaaccaccgcctgattactcagtgtagtgaggtaatcaatctggaacaacttgtggcgcagaacgggattattacgcacacccgcaatcatcgccgtcatcaactggttgataagttcactggcggcggggaagctatccacgcggatgcggcttttggtttgttgatcgaaaatgatgtgatacaggtcatcgccatcgtgccagatgcggaactccgcgcgcatccggtaatgactgaccgggctgcgaaacacttccggaaccaggtcagaaaacggtgccatcatactttgcaaacgtaccactttttcggctaactgcgcttcatactgttctgttggaaggtgttcgggggtcatgatgtatcctgaaaaattaaagtacgcggcgattgtagggattgctcatcagatgtccagatcttgatgaattcctatttgtgagctacgtctggacagtaacttgttacaacctgtagcatccacttgccggtcctgtgagttaatagggaatccagtgcgaatctggagctgacgcgcagcggtaaggaaaggtgcgatgattgcgttatgcggacactgccattcggtgggaagtcatcatctcttagtatcttagatacccctccaagcccgaagacctgccggccaacgtcgcatctggttctcatcatcgcgtaatattgatgaaacctgcggcatccttcttctattgtggatgctttacaatgattaaaaaagctagcctgctgacggcgtgttccgtcacggcattttccgcttgggcacaggataccagcccggatactctcgtcgttactgctaaccgttttgaacagccgcgcagcactgtgcttgcaccaaccaccgttgtgacccgtcaggatatcgaccgctggcagagcaccagcgtcaatgatgtgctgcgccgtcttccgggcgtcgatatcacccaaaacggcggtagtggtcagctcagttctatttttattcgcggtacaaatgccagtcatgtgttggtgttaattgatggcgtacgcctgaatctggcgggggtgagtggttctgccgaccttagccagttccctattgcgcttgtccagcgtgttgaatatatccgtgggccgcgctccgctgtttatggttccgatgcaataggcggggtggtgaatatcatcacgacgcgcgatgaacccggaacggaaattagtgcagggtggggaagcaatagttatcagaactatgatgtctctacgcagcaacaactgggggataagacacgggtaacgctgttgggcgattatgcccatactcatggttatgatgttgttgcctatggtaataccggaacgcaagcgcagacagataacgatggttttttaagtaaaacgctttatggcgcgctggagcataactttactgatgcctggagcggctttgtgcgcggctatggctatgataaccgtaccaattatgacgcgtattattctcccggtagtccgttgctcgatacccgtaaactctatagccaaagttgggacgccgggctgcgctataacggcgaactgattaaaagtcaactcattaccagctatagccatagcaaagattacaactacgatccccattatggtcgttatgatagcagcgcgacgctcgatgagatgaagcaatacaccgtccagtgggcaaacaatgtcatcgttggtcacggtagtattggtgcgggtgtcgactggcagaaacagactacgacgccgggtacaggttatgttgaggatggatatgatcaacgtaataccggcatctatctgaccgggctgcaacaagtcggcgattttacctttgaaggcgcagcacgcagtgacgataacagtcagtttggtcgtcatggaacctggcaaaccagcgccggttgggaattcatcgaaggttatcgcttcattgcttcctacgggacatcttataaggcaccaaatctggggcaactgtatggcttctacggaaatccgaatctggacccggagaaaagcaaacagtgggaaggcgcgtttgaaggcttaaccgctggggtgaactggcgtatttccggatatcgtaacgatgtcagtgacttgatcgattatgatgatcacaccctgaaatattacaacgaagggaaagcgcggattaagggcgtcgaggcgaccgccaattttgataccggaccactgacgcatactgtgagttatgattatgtcgatgcgcgcaatgcgattaccgacacgccgttgttacgccgtgctaaacagcaggtgaaataccagctcgactggcagttgtatgacttcgactggggtattacttatcagtatttaggcactcgctatgataaggattacagttcttatccttatcaaaccgttaaaatgggcggtgtgagcttgtgggatcttgcggttgcgtatccggtcacctctcacctgacagttcgtggtaaaatagccaacctgttcgacaaagattatgagacagtctatggctaccaaactgcaggacgggaatacaccttgtctggcagctacaccttctgaaccacgtcccaccgtgctggtgtttgactccggcgtcggtgggttgagcgtctatgacgagatccggcatctcttaccggatctccattacatttatgctttcgataacgtcgctttcccgtatggcgaaaaaagcgaagcgtttattgttgagcgagtggtggcaattgtcaccgcggtgcaagaacgttatccccttgcgctggctgtggtcgcttgcaacactgccagtaccgttagtcttcctgcattacgcgaaaagttcgacttcccggttgttggtgtcgtgccggcgattaaacctgctgcacgtctgacggcaaatggcattgtcggattactggcaacccgcggaacagttaaacgttcttatactcatgagctgatcgcgcgtttcgctaatgaatgccagatagaaatgctgggcagcgcagagatggttgagttggctgaagcgaagctacatggcgaagatgtttctctggatgcactaaaacgtatcctacgcccgtggttaagaatgaaagagccgccagataccgttgtattgggttgcacccatttccctctactacaagaagaactgttacaagtgctgccagagggaacccggctggtggattctggcgcagcgattgctcgccgaacggcctggttgttagaacatgaagccccggatgcaaaatctgccgatgcgaatattgccttttgtatggcaatgacgccaggagctgaacaattattgcccgttttacagcgttacggcttcgaaacgctcgaaaaactggcagttttaggctgatttggttgaatgttgcgcggtcagaaaattattttaaatttcctcttgtcaggccggaataactccccataatgcgccaccactgacacggaacaacggcaaacacgccgccgggtcagcggggttctcctgagaactccggcagagaaagcaaaaataaatgcttgactctgtagcgggaaggcgtattatgcacaccccgcgccgctgagaaaaagcgaagcggcactgctctttaacaatttatcagacaatctgtgtgggcactcgaagatacggattcttaacgtcgcaagacgaaaaatgaataccaagtctcaagagtgaacacgtaattcattacgaagtttaattctttgagcgtcaaacttttaaattgaagagtttgatcatggctcagattgaacgctggcggcaggcctaacacatgcaagtcgaacggtaacaggaagaagcttgcttctttgctgacgagtggcggacgggtgagtaatgtctgggaaactgcctgatggagggggataactactggaaacggtagctaataccgcataacgtcgcaagaccaaagagggggaccttcgggcctcttgccatcggatgtgcccagatgggattagctagtaggtggggtaacggctcacctaggcgacgatccctagctggtctgagaggatgaccagccacactggaactgagacacggtccagactcctacgggaggcagcagtggggaatattgcacaatgggcgcaagcctgatgcagccatgccgcgtgtatgaagaaggccttcgggttgtaaagtactttcagcggggaggaagggagtaaagttaatacctttgctcattgacgttacccgcagaagaagcaccggctaactccgtgccagcagccgcggtaatacggagggtgcaagcgttaatcggaattactgggcgtaaagcgcacgcaggcggtttgttaagtcagatgtgaaatccccgggctcaacctgggaactgcatctgatactggcaagcttgagtctcgtagaggggggtagaattccaggtgtagcggtgaaatgcgtagagatctggaggaataccggtggcgaaggcggccccctggacgaagactgacgctcaggtgcgaaagcgtggggagcaaacaggattagataccctggtagtccacgccgtaaacgatgtcgacttggaggttgtgcccttgaggcgtggcttccggagctaacgcgttaagtcgaccgcctggggagtacggccgcaaggttaaaactcaaatgaattgacgggggcccgcacaagcggtggagcatgtggtttaattcgatgcaacgcgaagaaccttacctggtcttgacatccacggaagttttcagagatgagaatgtgccttcgggaaccgtgagacaggtgctgcatggctgtcgtcagctcgtgttgtgaaatgttgggttaagtcccgcaacgagcgcaacccttatcctttgttgccagcggtccggccgggaactcaaaggagactgccagtgataaactggaggaaggtggggatgacgtcaagtcatcatggcccttacgaccagggctacacacgtgctacaatggcgcatacaaagagaagcgacctcgcgagagcaagcggacctcataaagtgcgtcgtagtccggattggagtctgcaactcgactccatgaagtcggaatcgctagtaatcgtggatcagaatgccacggtgaatacgttcccgggccttgtacacaccgcccgtcacaccatgggagtgggttgcaaaagaagtaggtagcttaaccttcgggagggcgcttaccactttgtgattcatgactggggtgaagtcgtaacaaggtaaccgtaggggaacctgcggttggatcacctccttaccttaaagaagcgtactttgtagtgctcacacagattgtctgatagaaagtgaaaagcaaggcgtttacgcgttgggagtgaggctgaagagaataaggccgttcgctttctattaatgaaagctcaccctacacgaaaatatcacgcaacgcgtgataagcaattttcgtgtccccttcgtctagaggcccaggacaccgccctttcacggcggtaacaggggttcgaatcccctaggggacgccacttgctggtttgtgagtgaaagtcgccgaccttaatatctcaaaactcatcttcgggtgatgtttgagatatttgctctttaaaaatctggatcaagctgaaaattgaaacactgaacaacgagagttgttcgtgagtctctcaaattttcgcaacacgatgatgaatcgaaagaaacatcttcgggttgtgaggttaagcgactaagcgtacacggtggatgccctggcagtcagaggcgatgaaggacgtgctaatctgcgataagcgtcggtaaggtgatatgaaccgttataaccggcgatttccgaatggggaaacccagtgtgtttcgacacactatcattaactgaatccataggttaatgaggcgaaccgggggaactgaaacatctaagtaccccgaggaaaagaaatcaaccgagattcccccagtagcggcgagcgaacggggagcagcccagagcctgaatcagtgtgtgtgttagtggaagcgtctggaaaggcgcgcgatacagggtgacagccccgtacacaaaaatgcacatgctgtgagctcgatgagtagggcgggacacgtggtatcctgtctgaatatggggggaccatcctccaaggctaaatactcctgactgaccgatagtgaaccagtaccgtgagggaaaggcgaaaagaaccccggcgaggggagtgaaaaagaacctgaaaccgtgtacgtacaagcagtgggagcacgcttaggcgtgtgactgcgtaccttttgtataatgggtcagcgacttatattctgtagcaaggttaaccgaataggggagccgaagggaaaccgagtcttaactgggcgttaagttgcagggtatagacccgaaacccggtgatctagccatgggcaggttgaaggttgggtaacactaactggaggaccgaaccgactaatgttgaaaaattagcggatgacttgtggctgggggtgaaaggccaatcaaaccgggagatagctggttctccccgaaagctatttaggtagcgcctcgtgaattcatctccgggggtagagcactgtttcggcaagggggtcatcccgacttaccaacccgatgcaaactgcgaataccggagaatgttatcacgggagacacacggcgggtgctaacgtccgtcgtgaagagggaaacaacccagaccgccagctaaggtcccaaagtcatggttaagtgggaaacgatgtgggaaggcccagacagccaggatgttggcttagaagcagccatcatttaaagaaagcgtaatagctcactggtcgagtcggcctgcgcggaagatgtaacggggctaaaccatgcaccgaagctgcggcagcgacgcttatgcgttgttgggtaggggagcgttctgtaagcctgcgaaggtgtgctgtgaggcatgctggaggtatcagaagtgcgaatgctgacataagtaacgataaagcgggtgaaaagcccgctcgccggaagaccaagggttcctgtccaacgttaatcggggcagggtgagtcgacccctaaggcgaggccgaaaggcgtagtcgatgggaaacaggttaatattcctgtacttggtgttactgcgaaggggggacggagaaggctatgttggccgggcgacggttgtcccggtttaagcgtgtaggctggttttccaggcaaatccggaaaatcaaggctgaggcgtgatgacgaggcactacggtgctgaagcaacaaatgccctgcttccaggaaaagcctctaagcatcaggtaacatcaaatcgtaccccaaaccgacacaggtggtcaggtagagaataccaaggcgcttgagagaactcgggtgaaggaactaggcaaaatggtgccgtaacttcgggagaaggcacgctgatatgtaggtgaggtccctcgcggatggagctgaaatcagtcgaagataccagctggctgcaactgtttattaaaaacacagcactgtgcaaacacgaaagtggacgtatacggtgtgacgcctgcccggtgccggaaggttaattgatggggttagcgcaagcgaagctcttgatcgaagccccggtaaacggcggccgtaactataacggtcctaaggtagcgaaattccttgtcgggtaagttccgacctgcacgaatggcgtaatgatggccaggctgtctccacccgagactcagtgaaattgaactcgctgtgaagatgcagtgtacccgcggcaagacggaaagaccccgtgaacctttactatagcttgacactgaacattgagccttgatgtgtaggataggtgggaggctttgaagtgtggacgccagtctgcatggagccgaccttgaaataccaccctttaatgtttgatgttctaacgttgacccgtaatccgggttgcggacagtgtctggtgggtagtttgactggggcggtctcctcctaaagagtaacggaggagcacgaaggttggctaatcctggtcggacatcaggaggttagtgcaatggcataagccagcttgactgcgagcgtgacggcgcgagcaggtgcgaaagcaggtcatagtgatccggtggttctgaatggaagggccatcgctcaacggataaaaggtactccggggataacaggctgataccgcccaagagttcatatcgacggcggtgtttggcacctcgatgtcggctcatcacatcctggggctgaagtaggtcccaagggtatggctgttcgccatttaaagtggtacgcgagctgggtttagaacgtcgtgagacagttcggtccctatctgccgtgggcgctggagaactgaggggggctgctcctagtacgagaggaccggagtggacgcatcactggtgttcgggttgtcatgccaatggcactgcccggtagctaaatgcggaagagataagtgctgaaagcatctaagcacgaaacttgccccgagatgagttctccctgaccctttaagggtcctgaaggaacgttgaagacgacgacgttgataggccgggtgtgtaagcgcagcgatgcgttgagctaaccggtactaatgaaccgtgaggcttaaccttacaacgccgaagctgttttggcggatgagagaagattttcagcctgatacagattaaatcagaacgcagaagcggtctgataaaacagaatttgcctggcggcagtagcgcggtggtcccacctgaccccatgccgaactcagaagtgaaacgccgtagcgccgatggtagtgtggggtctccccatgcgagagtagggaactgccaggcatcaaataaaacgaaaggctcagtcgaaagactgggcctttcgttttatctgttgtttgtcggtgaacgctctcctgagtaggacaaatccgccgggagcggatttgaacgttgcgaagcaacggcccggagggtggcgggcaggacgcccgccataaactgccaggcatcaaattaagcagaaggccatcctgacggatggcctttttgcgtttctacaaactcttcctgtcgtcatatctacaagccatccccccacagatacggtaaactagcctcgtttttgcatcaggaaagcagctatgaaccactccttaaaaccctggaacacatttggcattgatcataatgctcagcacattgtatgtgccgaagacgaacaacaattactcaatgcctggcagtatgcaaccgcagaaggacaacccgttcttattctgggtgaaggaagtaatgtactttttctggaggactatcgcggcacggtgatcatcaaccggatcaaaggtatcgaaattcatgatgaacctgatgcgtggtatttacatgtaggagccggagaaaactggcatcgtctggtaaaatacactttgcaggaaggtatgcctggtctggaaaatctggcattaattcctggttgtgtcggcagtagtcctatccagaatattggtgcttatggcgtagaattacagcgagtttgcgcttatgttgattctgttgaactggcgacaggcaagcaagtgcgcttaactgccaaagagtgccgttttggctatcgcgacagtatttttaaacatgaataccaggaccgcttcgctattgtagccgtaggtctgcgtctgccaaaagagtggcaacctgtactaacgtatggtgacttaactcgtctggatcctacaacagtaacgccacagcaagtatttaatgcggtgtgtcatatgcgcaccaccaaactccctgatccaaaagtgaatggcaatgccggtagtttcttcaaaaaccctgttgtatctgccgaaacggctaaagcattactgagtcaatttccaacagcaccaaattacccccaggcggatggtagtgtaaaactggcagcaggttggcttatcgatcagtgccagctaaaagggatgcaaataggtggggctgcggtgcaccgtcaacaggcgttagttctcattaatgaagacaatgcaaaaagcgaagatgttgtacagctggcgcatcatgtaagacagaaagttggtgaaaaatttaatgtctggcttgagcctgaagtccgctttattggtgcaagtggtgaagtgagcgcagtggagacaattagttgaaataaagcgcagtggagacaatttcatgaaggataacaccgtgccactgaaattgattgccctgttagcgaacggtgaatttcactctggcgagcagttgggtgaaacgctgggaatgagccgggcggctattaataaacacattcagacactgcgtgactggggcgttgatgtctttaccgttccgggtaaaggatacagcctgcctgagcctatccagttacttaatgctaaacagatattgggtcagctggatggcggtagtgtagccgtgctgccagtgattgactccacgaatcagtaccttcttgatcgtatcggagagcttaaaagcggcgatgcttgcattgcagaataccagcaggctggccgtggtcgccggggtcggaaatggtttagcccttttggcgcaaacttatatttgagcatgttctggcgtctggaacaaggcccggcggcggcgattggtttaagtctggttatcggtatcgtgatggcggaagtattacgcaagctgggtgcagataaagttcgtgttaaatggcctaatgacctctatctgcaggatcgcaagctggcaggcattctggtggagctgactggcaaaactggcgatgcggcgcaaatagtcattggagccgggatcaacatggcaatgcgccgtgttgaagagagtgtcgttaatcaggggtggatcacgctgcaggaagcggggatcaatctcgatcgtaatacgttggcggccatgctaatacgtgaattacgtgctgcgttggaactcttcgaacaagaaggattggcaccttatctgagccgctgggaaaagctggataattttattaatcgcccagtgaaacttatcattggtgataaagaaatatttggcattagtcgcggaatagacaaacagggggctttattacttgagcaggatggaataataaaaccctggatgggcggtgaaatatccctgcgtagtgcagaaaaataagaaaggggagtattcgctcccctgcaaattatttgcgtagtctgacctcttctaccgcatgattagcacttttcgtcaggattaaactggcgcgctcacgagtaggtagaatattttgctttaagttcagccagttgatctctttccacaatgtcatggcagtcttaatcgcttcttctttagttaatttcgcgtagttatgaaaataggaatccgggtcggtaaaagccccttcgcggaatttcagaaaacggttgatataccatgtctgaagtaagtcttccggtgcatcaacatatatgctaaaatcgacaaaatcagaaacaaatacatgatgtggatcgtgtggataatccatcccgctctgtaagacatttaacccttcaagaattaaaatatcaggctgaacaaccgttttatctccatccgggatcacatcataaataagatgactgtaaacaggtgctgtaacgtttggcacgccggatttgagatcggaaacaaacttcaccaggcgatgcatatcatagctttccgggaagcctttcttcttcatcagaccacgttctttcagaacctgattagggtgaaggaagccatctgtagtgatcagttcaacacgacgatgttccggccaacggcttaatagcgcctgcaatacacgggcggttgtacttttccccaccgcgacactgccagcaatactgataatgtaaggaatgcgttgcccgttggtaccaagaaactgttccagaactgcctgacggcgcagattgctgcttatatagaagttcagcaaacgactcaaaggtaaatagatctcggcaacttcttctaagctgagatcttcattaatacctttgagacgggcgatctcatcttcgcttaacgtcataggtacggaatcacgcagagctgcccactggttgcggtcaaactgtaggtaaggcgtcattaacgtttgctcttttatactcataagcatgtttctggcggtcatagctctatcggcaaagcgatatttgccatggcgcgtcacagttctgttgaatgggttaatgggcaggagggtaacaccagatggggaggaataataagaaaaaatctctgccaggaagctatcgttgaaaagcaatgtgacagatattccatctgataaaaagaattatggtttagcaggagcgcattgttgagcacaatgatgttgaaaaagtgtgctaatctgccctccgttcggctgtttcttcatcgtgtcgcataaaatgtgaccaataaaacaaattatgcaattttttagttgcatgaactcgcatgtctccatagaatgcgcgctacttgatgccgacttagctcagtaggtagagcaactgacttgtaatcagtaggtcaccagttcgattccggtagtcggcaccatcaagtccggtggggttcccgagcggccaaagggagcagactgtaaatctgccgtcacagacttcgaaggttcgaatccttcccccaccaccaatttcggccacgcgatggcgtagcccgagacgataagttcgcttaccggctcgaataaagagagcttctctcgatattcagtgcagaatgaaaatcaggtagccgagttccaggatgcgggcatcgtataatggctattacctcagccttccaagctgatgatgcgggttcgattcccgctgcccgctccaagatgtgctgatatagctcagttggtagagcgcacccttggtaagggtgaggtcggcagttcgaatctgcctatcagcaccacttcttttctcctccctgttttttccttctgtttattgcattcaacaagtcgggcatgttgcctggttgatgtggtgatatcaccgatttatccgtgtcttagagggacaatcgatgtctaaagaaaagtttgaacgtacaaaaccgcacgttaacgtcggtactatcggccacgttgaccatggtaaaacaacgctgaccgctgcaatcactaccgtactggctaaaacctacggcggtgctgctcgcgcattcgaccagatcgataacgcgccggaagaaaaagctcgtggtatcaccatcaacacttctcacgttgaatacgacaccccgacccgccactacgcacacgtagactgcccggggcacgccgactatgttaaaaacatgatcaccggtgctgcgcagatggacggcgcgatcctggtagttgctgcgactgacggcccgatgccgcagactcgtgagcacatcctgctgggtcgtcaggtaggcgttccgtacatcatcgtgttcctgaacaaatgcgacatggttgatgacgaagagctgctggaactggttgaaatggaagttcgtgaacttctgtctcagtacgacttcccgggcgacgacactccgatcgttcgtggttctgctctgaaagcgctggaaggcgacgcagagtgggaagcgaaaatcctggaactggctggcttcctggattcttacattccggaaccagagcgtgcgattgacaagccgttcctgctgccgatcgaagacgtattctccatctccggtcgtggtaccgttgttaccggtcgtgtagaacgcggtatcatcaaagttggtgaagaagttgaaatcgttggtatcaaagagactcagaagtctacctgtactggcgttgaaatgttccgcaaactgctggacgaaggccgtgctggtgagaacgtaggtgttctgctgcgtggtatcaaacgtgaagaaatcgaacgtggtcaggtactggctaagccgggcaccatcaagccgcacaccaagttcgaatctgaagtgtacattctgtccaaagatgaaggcggccgtcatactccgttcttcaaaggctaccgtccgcagttctacttccgtactactgacgtgactggtaccatcgaactgccggaaggcgtagagatggtaatgccgggcgacaacatcaaaatggttgttaccctgatccacccgatcgcgatggacgacggtctgcgtttcgcaatccgtgaaggcggccgtaccgttggcgcgggcgttgtagcaaaagttctgagctaattgccgataacatttgacgcaatgcgcactaaaagggcatcatttgatgccctttttgcacgctttcgtaccagaacctggctcatcagtgattttctttgtcataatcattgctgagacaggctctgttgagggcgtataatccgaaaagctaatacgcgtttcgatttggtttgcctcgcgatcgcggggtgaaaatgtttgtagaaaacttctgacaggttggtttatgagtgcgaataccgaagctcaaggaagcgggcgcggcctggaagcgatgaagtgggtcgttgtggtggcattgctcctggtggcgattgtcggcaactatctttatcgcgacattatgctgccgctgcgtgcgctggccgtagtaattctgattgctgcagcgggtggtgtcgcgctgttaacgacaaaaggtaaagctaccgttgcttttgcccgtgaagcgcgtaccgaagtccgtaaggtcatttggccgactcgccaggaaacattgcacaccacgctgattgtggctgcggttaccgcagtaatgagtctgatcctgtggggactggatggtattctggttcgcctggtatcctttatcactggcctgaggttctgagatgtctgaagctcctaaaaagcgctggtacgtcgttcaggcgttttccggttttgaaggccgcgtagcaacgagcctgcgtgagcatatcaaattacacaacatggaagatttgtttggtgaagtcatggtaccaaccgaagaagtggttgaaatccgtggcggtcagcgtcgcaaaagcgaacgtaaattcttccctggctacgtcctcgttcagatggtgatgaacgacgcgagctggcacctggtgcgcagcgtaccgcgtgtgatgggcttcatcggcggtacttccgatcgtcctgcgccaatcagcgataaagaagtcgatgcgattatgaaccgcctgcagcaggttggtgataagccgcgtccgaaaacgctgtttgaaccgggtgaaatggtccgtgttaatgatggtccgttcgctgacttcaacggtgttgttgaagaagtggattacgagaaatctcgtctgaaagtgtctgtttctatcttcggtcgtgcgaccccggtagagctggacttcagccaggttgaaaaagcctaacccagcgatcaaaaaagcggcgatttaatcgttgcacaaggcgtgagattggaatacaatttcgcgccttttgtttttatgggccttgcccgtaaaacgattttttatatcacggggagcctctcagaggcgttattacccaacttgaggaatttataatggctaagaaagtacaagcctatgtcaagctgcaggttgcagctggtatggctaacccgagtccgccagtaggtccggctctgggtcagcagggcgtaaacatcatggaattctgcaaagcgttcaacgcaaaaactgattccatcgaaaaaggtctgccgattccggtagtaatcaccgtttacgctgaccgttctttcactttcgttaccaagaccccgccggcagcagttctgctgaaaaaagcggctggtatcaagtctggttccggtaagccgaacaaagacaaagtgggtaaaatttcccgcgctcagctgcaggaaatcgcgcagaccaaagctgccgacatgactggtgccgacattgaagcgatgactcgctccatcgaaggtactgcacgttccatgggcctggtagtggaggactaagaaatggctaaactgaccaagcgcatgcgtgttatccgcgagaaagttgatgcaaccaaacagtacgacatcaacgaagctatcgcactgctgaaagagctggcgactgctaaattcgtagaaagcgtggacgtagctgttaacctcggcatcgacgctcgtaaatctgaccagaacgtacgtggtgcaactgtactgccgcacggtactggccgttccgttcgcgtagccgtatttacccaaggtgcaaacgctgaagctgctaaagctgcaggcgcagaactggtaggtatggaagatctggctgaccagatcaagaaaggcgaaatgaactttgacgttgttattgcttctccggatgcaatgcgcgttgttggccagctgggccaggttctgggtccgcgcggcctgatgccaaacccgaaagtgggtactgtaacaccgaacgttgctgaagcggttaaaaacgctaaagctggccaggttcgttaccgtaacgacaaaaacggcatcatccacaccaccatcggtaaagtggactttgacgctgacaaactgaaagaaaacctggaagctctgctggttgcgctgaaaaaagcaaaaccgactcaggcgaaaggcgtgtacatcaagaaagttagcatctccaccaccatgggtgcaggtgttgcagttgaccaggctggcctgagcgcttctgtaaactaatgcctttacgtgggcggtgattttgtctacaatcttacccccacgtataatgcttaatgcagacgtatatccgagatattcgggttgtggcaaggcggcaactgagtgagtcgccaggagcatagctaactatgtgactggtgcgaatgaaggaagccaacgccgtcacaagctgaatagcgacggatagaaaagatttgttcgttggagcctggcctatccaggcctccgtcgaagaccgcaggagtttcgcaagaaacttaatcccctgcgtagacggtgacagaacgctaagattattcttttatattctggcttgtttctgctcaccgtaattaagacgctctctccgtttggaggagtgaagtgagttccagagattttctctggcaaacatccaggagcaaagctaatggctttaaatcttcaagacaaacaagcgattgttgctgaagtcagcgaagtagccaaaggcgcgctgtctgcagtagttgcggattcccgtggcgtaactgtagataaaatgactgaactgcgtaaagcaggtcgcgaagctggcgtatacatgcgtgttgttcgtaacaccctgctgcgccgtgctgttgaaggtactccgttcgagtgcctgaaagacgcgtttgttggtccgaccctgattgcatactctatggaacacccgggcgctgctgctcgtctgttcaaagagttcgcgaaagcgaatgcaaaatttgaggtcaaagccgctgcctttgaaggtgagctgatcccggcgtctcagatcgaccgcctggcaactctgccgacctacgaagaagcaattgcacgcctgatggcaaccatgaaagaagctagcgctggcaaactggttcgtactctggctgctgtacgcgatgcgaaagaagctgcttaatcgcagttatctttttaacgcattcgcttacgtataaacttattctgatattcaggaacaatttaaatgtctatcactaaagatcaaatcattgaagcagttgcagctatgtctgtaatggacgttgtagaactgatctctgcaatggaagaaaaattcggtgtttccgctgctgctgctgtagctgtagctgctggcccggttgaagctgctgaagaaaaaactgaattcgacgtaattctgaaagctgctggcgctaacaaagttgctgttatcaaagcagtacgtggcgcaactggcctgggtctgaaagaagctaaagacctggtagaatctgcaccggctgctctgaaagaaggcgtgagcaaagacgacgcagaagcactgaaaaaagctctggaagaagctggcgctgaagttgaagttaaataagccaacccttccggttgcagcctgagaaatcaggctgatggctggtgactttttagtcaccagcctttttgcgctgtaaggcgccagtagcgtttcacactgtttgactactgctgtgcctttcaatgcttgtttctatcgacgacttaatatactgcgacaggacgtccgttctgtgtaaatcgcaatgaaatggtttaagcgtgatagcaacaggcattgcggaaagtgttccattttccggtcaacaaaatagtgttgcacaaactgtccgctcaatggacagatgggtcgacttgtcagcgagctgaggaaccctatggtttactcctataccgagaaaaaacgtattcgtaaggattttggtaaacgtccacaagttctggatgtaccttatctcctttctatccagcttgacagctttcagaaatttatcgagcaagatcctgaagggcagtatggtctggaagctgctttccgttccgtattcccgattcagagctacagcggtaattccgagctgcaatacgtcagctaccgccttggcgaaccggtgtttgacgtccaggaatgtcaaatccgtggcgtgacctattccgcaccgctgcgcgttaaactgcgtctggtgatctatgagcgcgaagcgccggaaggcaccgtaaaagacattaaagaacaagaagtctacatgggcgaaattccgctcatgacagacaacggtacctttgttatcaacggtactgagcgtgttatcgtttcccagctgcaccgtagtccgggcgtcttctttgactccgacaaaggtaaaacccactctagcggtaaagtgctgtataacgcgcgtatcatcccttaccgtggttcctggctggacttcgaattcgatccgaaggacaacctgttcgtacgtatcgaccgtcgccgtaaactgcctgcgaccatcattctgcgcgccctgaactacaccacagagcagatcctcgacctgttctttgaaaaagttatctttgaaatccgtgataacaagctgcagatggaactggtgccggaacgcctgcgtggtgaaaccgcatcttttgacatcgaagctaacggtaaagtgtacgtagaaaaaggccgccgtatcactgcgcgccacattcgccagctggaaaaagacgacgtcaaactgatcgaagtcccggttgagtacatcgcaggtaaagtggttgctaaagactatattgatgagtctaccggcgagctgatctgcgcagcgaacatggagctgagcctggatctgctggctaagctgagccagtctggtcacaagcgtatcgaaacgctgttcaccaacgatctggatcacggcccatatatctctgaaaccttacgtgtcgacccaactaacgaccgtctgagcgcactggtagaaatctaccgcatgatgcgccctggcgagccgccgactcgtgaagcagctgaaagcctgttcgagaacctgttcttctccgaagaccgttatgacttgtctgcggttggtcgtatgaagttcaaccgttctctgctgcgcgaagaaatcgaaggttccggtatcctgagcaaagacgacatcattgatgttatgaaaaagctcatcgatatccgtaacggtaaaggcgaagtcgatgatatcgaccacctcggcaaccgtcgtatccgttccgttggcgaaatggcggaaaaccagttccgcgttggcctggtacgtgtagagcgtgcggtgaaagagcgtctgtctctgggcgatctggataccctgatgccacaggatatgatcaacgccaagccgatttccgcagcagtgaaagagttcttcggttccagccagctgtctcagtttatggaccagaacaacccgctgtctgagattacgcacaaacgtcgtatctccgcactcggcccaggcggtctgacccgtgaacgtgcaggcttcgaagttcgagacgtacacccgactcactacggtcgcgtatgtccaatcgaaacccctgaaggtccgaacatcggtctgatcaactctctgtccgtgtacgcacagactaacgaatacggcttccttgagactccgtatcgtaaagtgaccgacggtgttgtaactgacgaaattcactacctgtctgctatcgaagaaggcaactacgttatcgcccaggcgaactccaacttggatgaagaaggccacttcgtagaagacctggtaacttgccgtagcaaaggcgaatccagcttgttcagccgcgaccaggttgactacatggacgtatccacccagcaggtggtatccgtcggtgcgtccctgatcccgttcctggaacacgatgacgccaaccgtgcattgatgggtgcgaacatgcaacgtcaggccgttccgactctgcgcgctgataagccgctggttggtactggtatggaacgtgctgttgccgttgactccggtgtaactgcggtagctaaacgtggtggtgtcgttcagtacgtggatgcttcccgtatcgttatcaaagttaacgaagacgagatgtatccgggtgaagcaggtatcgacatctacaacctgaccaaatacacccgttctaaccagaacacctgtatcaaccagatgccgtgtgtgtctctgggtgaaccggttgaacgtggcgacgtgctggcagacggtccgtccaccgacctcggtgaactggcgcttggtcagaacatgcgcgtagcgttcatgccgtggaatggttacaacttcgaagactccatcctcgtatccgagcgtgttgttcaggaagaccgtttcaccaccatccacattcaggaactggcgtgtgtgtcccgtgacaccaagctgggtccggaagagatcaccgctgacatcccgaacgtgggtgaagctgcgctctccaaactggatgaatccggtatcgtttacattggtgcggaagtgaccggtggcgacattctggttggtaaggtaacgccgaaaggtgaaactcagctgaccccagaagaaaaactgctgcgtgcgatcttcggtgagaaagcctctgacgttaaagactcttctctgcgcgtaccaaacggtgtatccggtacggttatcgacgttcaggtctttactcgcgatggcgtagaaaaagacaaacgtgcgctggaaatcgaagaaatgcagctcaaacaggcgaagaaagacctgtctgaagaactgcagatcctcgaagcgggtctgttcagccgtatccgtgctgtgctggtagccggtggcgttgaagctgagaagctcgacaaactgccgcgcgatcgctggctggagctgggcctgacagacgaagagaaacaaaatcagctggaacagctggctgagcagtatgacgaactgaaacacgagttcgagaagaaactcgaagcgaaacgccgcaaaatcacccagggcgacgatctggcaccgggcgtgctgaagattgttaaggtatatctggcggttaaacgccgtatccagcctggtgacaagatggcaggtcgtcacggtaacaagggtgtaatttctaagatcaacccgatcgaagatatgccttacgatgaaaacggtacgccggtagacatcgtactgaacccgctgggcgtaccgtctcgtatgaacatcggtcagatcctcgaaacccacctgggtatggctgcgaaaggtatcggcgacaagatcaacgccatgctgaaacagcagcaagaagtcgcgaaactgcgcgaattcatccagcgtgcgtacgatctgggcgctgacgttcgtcagaaagttgacctgagtaccttcagcgatgaagaagttatgcgtctggctgaaaacctgcgcaaaggtatgccaatcgcaacgccggtgttcgacggtgcgaaagaagcagaaattaaagagctgctgaaacttggcgacctgccgacttccggtcagatccgcctgtacgatggtcgcactggtgaacagttcgagcgtccggtaaccgttggttacatgtacatgctgaaactgaaccacctggtcgacgacaagatgcacgcgcgttccaccggttcttacagcctggttactcagcagccgctgggtggtaaggcacagttcggtggtcagcgtttcggggagatggaagtgtgggcgctggaagcatacggcgcagcatacaccctgcaggaaatgctcaccgttaagtctgatgacgtgaacggtcgtaccaagatgtataaaaacatcgtggacggcaaccatcagatggagccgggcatgccagaatccttcaacgtattgttgaaagagattcgtagcctgggtatcaacatcgaactggaagacgagtaattctcgctcaaacaggtcactgctgtcgggttaaaacccggcagcggattgtgctaactccgacgggagcaaatccgtgaaagatttattaaagtttctgaaagcgcagactaaaaccgaagagtttgatgcgatcaaaattgctctggctagcccagacatgatccgtagttggtctttcggtgaagttaaaaagccggaaaccatcaactaccgtacgttcaaaccagaacgtgacggccttttctgcgcccgtatctttgggccggtaaaagattacgagtgcctgtgcggtaagtacaagcgcctgaaacaccgtggcgtcatctgtgagaagtgcggcgttgaagtgacccagactaaagtacgccgtgagcgtatgggccacatcgaactggcttccccgactgcgcacatctggttcctgaaaagcctgccgtcccgtatcggtctgctgctcgatatgccgctgcgcgatatcgaacgcgtactgtactttgaatcctatgtggttatcgaaggcggtatgaccaacctggaacgtcagcagatcctgactgaagagcagtatctggacgcgctggaagagttcggtgacgaattcgacgcgaagatgggggcggaagcaatccaggctctgctgaagagcatggatctggagcaagagtgcgaacagctgcgtgaagagctgaacgaaaccaactccgaaaccaagcgtaaaaagctgaccaagcgtatcaaactgctggaagcgttcgttcagtctggtaacaaaccagagtggatgatcctgaccgttctgccggtactgccgccagatctgcgtccgctggttccgctggatggtggtcgtttcgcgacttctgacctgaacgatctgtatcgtcgcgtcattaaccgtaacaaccgtctgaaacgtctgctggatctggctgcgccggacatcatcgtacgtaacgaaaaacgtatgctgcaggaagcggtagacgccctgctggataacggtcgtcgcggtcgtgcgatcaccggttctaacaagcgtcctctgaaatctttggccgacatgatcaaaggtaaacagggtcgtttccgtcagaacctgctcggtaagcgtgttgactactccggtcgttctgtaatcaccgtaggtccatacctgcgtctgcatcagtgcggtctgccgaagaaaatggcactggagctgttcaaaccgttcatctacggcaagctggaactgcgtggtcttgctaccaccattaaagctgcgaagaaaatggttgagcgcgaagaagctgtcgtttgggatatcctggacgaagttatccgcgaacacccggtactgctgaaccgtgcaccgactctgcaccgtctgggtatccaggcatttgaaccggtactgatcgaaggtaaagctatccagctgcacccgctggtttgtgcggcatataacgccgacttcgatggtgaccagatggctgttcacgtaccgctgacgctggaagcccagctggaagcgcgtgcgctgatgatgtctaccaacaacatcctgtccccggcgaacggcgaaccaatcatcgttccgtctcaggacgttgtactgggtctgtactacatgacccgtgactgtgttaacgccaaaggcgaaggcatggtgctgactggcccgaaagaagcagaacgtctgtatcgctctggtctggcttctctgcatgcgcgcgttaaagtgcgtatcaccgagtatgaaaaagatgctaacggtgaattagtagcgaaaaccagcctgaaagacacgactgttggccgtgccattctgtggatgattgtaccgaaaggtctgccttactccatcgtcaaccaggcgctgggtaaaaaagcaatctccaaaatgctgaacacctgctaccgcattctcggtctgaaaccgaccgttatttttgcggaccagatcatgtacaccggcttcgcctatgcagcgcgttctggtgcatctgttggtatcgatgacatggtcatcccggagaagaaacacgaaatcatctccgaggcagaagcagaagttgctgaaattcaggagcagttccagtctggtctggtaactgcgggcgaacgctacaacaaagttatcgatatctgggctgcggcgaacgatcgtgtatccaaagcgatgatggataacctgcaaactgaaaccgtgattaaccgtgacggtcaggaagagaagcaggtttccttcaacagcatctacatgatggccgactccggtgcgcgtggttctgcggcacagattcgtcagcttgctggtatgcgtggtctgatggcgaagccggatggctccatcatcgaaacgccaatcaccgcgaacttccgtgaaggtctgaacgtactccagtacttcatctccacccacggtgctcgtaaaggtctggcggataccgcactgaaaactgcgaactccggttacctgactcgtcgtctggttgacgtggcgcaggacctggtggttaccgaagacgattgtggtacccatgaaggtatcatgatgactccggttatcgagggtggtgacgttaaagagccgctgcgcgatcgcgtactgggtcgtgtaactgctgaagacgttctgaagccgggtactgctgatatcctcgttccgcgcaacacgctgctgcacgaacagtggtgtgacctgctggaagagaactctgtcgacgcggttaaagtacgttctgttgtatcttgtgacaccgactttggtgtatgtgcgcactgctacggtcgtgacctggcgcgtggccacatcatcaacaagggtgaagcaatcggtgttatcgcggcacagtccatcggtgaaccgggtacacagctgaccatgcgtacgttccacatcggtggtgcggcatctcgtgcggctgctgaatccagcatccaagtgaaaaacaaaggtagcatcaagctcagcaacgtgaagagcgttgtgaactccagcggtaaactggttatcacttcccgtaatactgaactgaaactgatcgacgaattcggtcgtactaaagaaagctacaaagtaccttacggtgcggtactggcgaaaggcgatggcgaacaggttgctggcggcgaaaccgttgcaaactgggacccgcacaccatgccggttatcaccgaagtaagcggttttgtacgctttactgacatgatcgacggccagaccattacgcgtcagaccgacgaactgaccggtctgtctagcctggtggttctggattccgcagaacgtaccgcaggtggtaaagatctgcgtccggcactgaaaatcgttgatgctcagggtaacgacgttctgatcccaggtaccgatatgccagcgcagtacttcctgccgggtaaagcgattgttcagctggaagatggcgtacagatcagctctggtgacaccctggcgcgtattccgcaggaatccggcggtaccaaggacatcaccggtggtctgccgcgcgttgcggacctgttcgaagcacgtcgtccgaaagagccggcaatcctggctgaaatcagcggtatcgtttccttcggtaaagaaaccaaaggtaaacgtcgtctggttatcaccccggtagacggtagcgatccgtacgaagagatgattccgaaatggcgtcagctcaacgtgttcgaaggtgaacgtgtagaacgtggtgacgtaatttccgacggtccggaagcgccgcacgacattctgcgtctgcgtggtgttcatgctgttactcgttacatcgttaacgaagtacaggacgtataccgtctgcagggcgttaagattaacgataaacacatcgaagttatcgttcgtcagatgctgcgtaaagctaccatcgttaacgcgggtagctccgacttcctggaaggcgaacaggttgaatactctcgcgtcaagatcgcaaaccgcgaactggaagcgaacggcaaagtgggtgcaacttactcccgcgatctgctgggtatcaccaaagcgtctctggcaaccgagtccttcatctccgcggcaagcttccaggagaccactcgcgtgctgaccgaagcagccgttgcgggcaaacgcgacgaactgcgcggcctgaaagagaacgttatcgtgggtcgtctgatcccggcaggtaccggttacgcgtaccaccaggatcgtatgcgtcgccgtgctgcgggtgaagctccggctgcaccgcaggtgactgcagaagacgcatctgccagcctggcagaactgctgaacgcaggtctgggcggttctgataacgagtaatcgttaatccgcaaataacgtaaaaacccgcttcggcgggtttttttatggggggagtttagggaaagagcatttgtcagaatatttaaggaatttctgaatactcataatcaatgtagagatgactaatatcctgaaactgactgaactaattgagtcaaactcggcaaggattcgatactattcctgtgtaactttcttaaggaacgagaatgaaacaggaagtggaaaagtggcgaccttttggacatccggatggtgatattcgtgatttaagttttcttgatgctcatcaggctgtctacgttcagcatcatgagggcaaagagcctttagagtatcgcttttgggttacctactctcttcactgcttcacaaaagattatgaacatcagacgaacgaagaaaaacaaagcttaatgtaccacgcgcctaaagaatctcgtcccttctgccagcaccgttataacttagcgcgcacacacttaaaaagaactattttggcgctgccagaaagcaacgttattcatgccgggtatggtagctatgccgtgattgaggtggacttagacggaggagataaggcattttactttgttgcgttcagggctttcagggaaaagaaaaaactccgtttgcatgtaactagcgcttatcccatttctgaaaaacagaaaggtaaaagtgtgaaatttttcaccattgcctacaacttattgagaaataagcagcttcctcagcccagtaaataacaaaacccaccttaaggtgggtttcgccagagaattatctctggtattcagaacgccattaccggactttgccttgaccttgcgataatcgcaggttgcgggatgtctgaatttcttcagtctgctgcatcctggaagatgagaacatgtgttcttattttcgtctctatcatagttgagtatttactctcttacaatcagatctctttcattgctcaacaggcgatggcttcagactttgcattacggaatttttaagaaaggcagggcgaaacgaggaagaagcttttcgccctggacaacattcctgctgacggcactaccataaaaaaacacaacgctttcaacaaccttgcgtttttcatcttccgtagcggctcggaataaatttacgttcttacattccgtctcatagtctttggctggcgcgtcccagatagctgtcccagtctttccataccggctgcaaaccctgagcggttaacgcggcagcaaccgcttccggtctgcgatcgtcgtgcggactgaactgttccaactcggggtgattatcggcatagccacctggctgcgttttgctgaaggcgctgacgttattgatcgccagcggaataacgcgatcgcgaaaccacggactttcccgcgtggagagactcagttcaatctccggtgcaagcagtcggaaggcgcagatggtttgcactaactggcgttcatccataatgctcgcaggctcaatgccgccagtacacgggcgcaggcgcggaaaggagacagagtaacggctttgccagtaatgctgttgcagccatagcaaatgttcggcaaccatatagctgtcaacgcgccagttgtcggaaaggccaattagcgcgccgaggcctatcttatcaatccccgcacgccccagccgatccggcgtttccagccgccagaagaagtcctgttttttgcctttcagatgatggcgggcataagtcgcctcgtgatatgtctcctgataaaccatcacgccatccagaccaagttgctttaactcggcgtattccgtctccgccagcggttgcacttccatctgtagactagagaactgttcacgaagggcagggagatgacgacgaaagtaatccatccccactttcgcctgatgttcaccagtgactaacagcagatgttcaaagcccatctcccgtatagcggcactttccctggcaatatccgcttcatccagcgttttgcgcttgatgcgattactcatggaaaatccacagtacgtgcagtcgttagcgcaaagattggaaagataaagcgggacgtagaaactaactgtgttgccaaatcgctgacgggtcagacgctgcgcccgttgggccagttgttccagatagccactggcggcagggcttaacagcgccatcatgtcgtcgcgggtgagttggctggcatttagcgcccgctctacgtcagcagccgttttgccgttgatacgcaggcggatgtcgtcccagtccagttgtcgccagcgatcgctgaaggttttcatgcgcttgcctccagaaatccggtcagcgggctggtggcatgagcaaaataactgcggctgcccggtccggactgacgtgccagtaggcctgcttctaccgccagacgaaatgccttcgccatgttgacgggatcgtccgcgacggcaatcgccgtattcactaacaccgcgtcggcccccatttccagcgcctgcgcggcatggctgggaacgccgatgccagcatcgacaaccaccggcactgtggcctgctggataataatctccagcatggcgcgggtttccagtccctgattgctgccaatcggcgcgccgagcggcatcaccgctgcacagccgacttcttccagacgtttacacaataccggatcggccccgcagtaaggcagcacgacaaatccctgttgtaccagcgtttcggcggctttcagggtttcgatgggatcgggcaacagccagcgggcgtcagggtgaatctctaattttaaccagtttgtgcctaacgcttcacgagccagatgggcggcgaaaatggcttcttccgctgttttcgccccggatgtatttggcagcagggtcacacccgccgcgataagcggttcgaggatagcgtcgttgtgctggcgcaagtcgacacgtttcatcgccagtgtcaccagctggctgccggaagcgcggatcgcctccaccatcagttgactagaagcgaatttccctgtgccggtaaacagatgactatcaaacgttttgtccgcaatacgtaacatttcaaccccctgcaataacctgaaaaagcaggatctggtcgccatcctgcacgatatgttgcgcccactgctcacgcgggacgatttgctgattaatcgccagagccgcgcccgcttgtcgttggtcgagttgctccagtagttcgtgaacagtttgcccggcggcgcactgcatcgcttgatcgttaaacaggatctgcattgcttcctccgcataccgggcaaccactggcgcggcgcaacgccaggctgcgccactggctgcttttaccgtcgaacagtcggagttctcccgcaggtgtctctataccgcttaataacttaatggcttccagtgcctgcaaagtgcccataaccccgaccaccgggccaaccacgcccgccgtgcggcagttgcgttctggctcctggttatctggccacaggcagcggtaacacccctgctcccagggcggcgtcagtaccatcaactgaccgccaaatccgaccgcgctggcggtgataagcggcgtgttgagtgccacgcaggcggcattaatctcctggcgagtcgccatattgtcggtacagtcgagcaccacatcggcccgtgcaaccgcatcttttaacgcctcacccgttaaccgttgttgtaatgctgtcagttgaatgtcgggattcaactgtgtcagtcgctgttggctgacctggcttttcgggcgatcgatatcttcagtggtaaagaggatttgtcgttgcagattgcttaaatgcacatcgtcgtcatctgccagtaccagcgtcccgacgccagcgcccgccaggtacagcgcagcaggtgtacccagcccgcccagaccgataatcagcacctggctgtcgagcagtttttgctgcccgtccagagcgatatcgtcgagcaggatttggcggctataacgcataaagtcacggtcattcatcgccaactcctgcaatttccagcaactgtgccgttgccaaacgccagtctgcggcttgagtaatggcgctgacgacggcgatactgccgacacccgttgctatcaccgcaggcgcgcgtgccagactgataccgccaatcgccacggtgggataatccgccagtcgctcaacatgccgtgccagctgttccagcccctgcggtgcagaaggcatctgtttggtttgcgtcgggaacacatgtcccagcgcgatataagaggggcgtgctgccagcgcgacgtcgatttccatatcgtcatgtgtgctaacgcccagccgcaggcctgccgcgcggatggcattgagatcggtggcttgcaaatcttcctgccccaaatggacgccatacgcctgatgcttgatcgccagccgccagtaatcgttgataaacaatcgcgcgttatagcggcggcccagcgcaattgccgccacgacatcggcttccacctcttcatcgcgccgatctttgatgcgtagctggagagtacgtacgcctgcatccaacagacgttcgatccactgtacgctgtccaccaccgggtacagtccactacgaaaaggtacaggaggaaaatcaggctgatacatcacgcttcctccttacgcaggtagatttctccgcctctggcacggaagttctcgctcatatccgccattcccatttcaatagtttgcgtggcggcgtaatcacgcacttcctggctgattttcatgctgcagaatttcggcccacacatggagcaaaaatgggcgactttaccactctcttgcggcagggtttcatcgtgataagcgcgggcggtaaacgggtcgagggccagattaaactggtcttcccagcgaaattcgaagcgggctttgctcatggcgttatcgcgaatttgcgcgcccggatgccctttcgccaggtcagcggcgtgggcagcaatcttataggtgataagcccctgcttaacatcttctttattgggcagacccagatgctcttttggcgttacgtaacagagcatcgcgcagccaaaccagccaatcatcgccgcaccaatcccgctcgtgaagtggtcatagcccggcgcaatatcggtagttagcggccccagagtgtaaaacggcgcttcgtggcagtgctctaactcctcggtcatattgcggcggatcatctgcatcggcacgtggcctgggccttcaatcatcacctgcacgtcatattcccaggcaattttggtcagttcgcccagcgtatgcagctcggcaaactgcgcttcatcgttggcgtcctgaatagaaccggggcgcagaccgtcgcccaggctcaggctaacgtcataagcggcacagatttcacaaatttcgcggaagtgttgatagaggaaattttcctgatgatgggagaggcaccatttcgccataatgctaccgccgcgagagacgataccggtcaggcgtttcgcggtcatcggcacatagcgcagcagtacgcccgcatggatagtgaagtaatccacaccttgctcggcctgttccagcagcgtgtcgcggaacgcttcccaggtaagatcttcggcgatcccgttaaccttctccagcgcctggtagatcggcactgtaccgatcggcaccgggctgttacgcaaaatccactcgcgggtttcgtgaatatagcgaccggtggagagatccatcaccgtatccgctccccagcgcgtggaccataccagcttttccacttcttcttcgatggaagaggtgaccgcgctgttgccgatattggcgttaacttttaccaggaaattgcgaccaataatcatcggctcgctttccggatgattaatgttggccgggataatcgcacgtccggcagcaacttcatcacggacaaattccgcagtgatattttccggcagatgtgcgccaaagctcattcccggatgctggtggcgtaaaacctcgctacggatgcgctcgcggcccatattctcgcggatggcgatgaattccatttccggcgtgatgatgccctggcgggcgtagtgcagttgggtgacacggcgtcctgctttggcgcgttttggtgttagtacgccgctaaaacgcagttcgtcgaggccatcatctgccagccgcgctttagtgtaatcggaactgcgcacggtaagttcttcggtatcgccgcgcgcatcgatccacggctggcgtagttttgccagcccttgctgcacgttaatggcaatctgcggatcaccatacgggccggaggtgtcgtagaccggaatcgcttcgttttcttcgtactgcggctgttctttgctaccgccaattagcgtcgggctaagctggatctcacgcatcggcacgcgcacgccggggtgtgtgccagtgatataaatgcgtttactgttgggaaaggcggtgccttccagggtgtcgataaaatgttgggcccgggcgcgttgttcgcggcgggtcagttttgttgcagacatagctcattccaaaaagttaaggacgtggcttgtcagacgacggatgaagcaagagacgatcgccgcaggggcgatgcgatagcagattaactcttgttcccttcgcaggtattagcctgatcaggttccgcggatcccgaataaacggtctcagccagttaaggcactccgacaagaaattagccccgcaaatggggcattgaatgtaaattacgcgttaacagcgcagaactcaagcaggatgtttgacgcgggcggcgtcaagcaccagcagaatcagcttatcttccagcacaaagcgcgcttccagcgcctcgccgatgtcagataaaacctgttgaaactcaaggtaattatcatgatcgatggcggtttccagactggaatcgtagtaatccataatctgttgagtattggcttcgagttgcggccaaatcttcgcggcgcgcgcgagttgcccgttgccttccagcttatgaagaatgcgctcataaatactgaaatgtccggcagacaagtaatcgaccaggctctgacaaaaatcatcaagggctttttcgtttagcctcatgtagctttctttgccaggcttaatgccaaccagattgtagtaagccacgagcagatgcttacgtacatgtagccagcgatcaaccagtttgttacttcctctgacgcgctccgtcaggttatcgagctggttaagcatgattgactccgcaagtttgtattcaaaaactgctcagtgagaaatgtaaaaaccatgttaaacatgccagtgatgcaaaggtagtgcaagagctatggatcgtataattgaaaaattagatcacggctggtgggtcgtcagccatgaacaaaaattatggttgccgaagggagaattgccatatggcgaagcggcaaatttcgatcttgtgggtcagcgcgcactacaaatcggcgaatggcagggggaacctgtttggttagtacaacagcagcggcgtcacgatatggggagcgtacgtcaggtcattgatctcgatgttgggctgtttcaactggccggacgaggcgtacaactggcggagttttaccgaagtcataaatactgtggttactgcgggcatgaaatgtatccgagcaaaaccgaatgggcgatgctgtgcagccattgccgtgagcgttactacccgcaaatcgccccctgcattattgttgccatccgtcgcgatgatagcatcctcctcgcccagcatacccgccatcgtaacggtgtccatacagtacttgccggattcgtcgaagtgggcgaaaccctcgagcaggcagtcgcgcgggaagtgatggaagagagcggaattaaagttaaaaacttgcgttacgtgacttctcagccgtggccgtttcctcagtctttaatgaccgcgtttatggcggaatatgacagcggcgacatcgtgatcgacccgaaagaattgctcgaggcgaactggtatcgctatgacgatttgccgttactcccgccgcccggcaccgtagcgcgccgtctgatagaagatacggtggcgatgtgtcgggcagagtatgagtgatgatacactgaccgcctgacgcactaaggaacagccaaaatgaccgaacttaaaaacgatcgttatctgcgggcgctgctgcgccagcccgttgatgtcactccagtatggatgatgcgccaggcgggtcgctatctaccggaatataaagccacgcgcgcccaggcaggcgattttatgagcctgtgcaaaaacgccgagctggcgtgcgaagtgactttgcaaccgctgcgtcgctacccgctggatgcggcgatcctcttttccgatatcctcaccgtgccggacgcgatggggttagggctctattttgaagccggagaaggtccgcgttttaccagcccagtcacctgcaaagctgacgtcgataaactgccaattccggacccggaagatgaactgggttacgtgatgaacgcggtgcgtaccattcgtcgcgaactgaaaggcgaagtgccgctgattggtttttccggcagcccgtggacgctggcgacctacatggtggaaggcggcagcagcaaagccttcaccgtgatcaaaaaaatgatgtatgccgatccgcaggcgctgcacgctctgctcgataaactggcgaaaagcgtcactttgtatctgaatgcgcagattaaagccggtgctcaggcagtgatgattttcgacacctggggcggcgtgcttaccgggcgcgattatcaacagttcagcctctattacatgcataaaattgttgatggtttactgcgtgaaaacgacggtcgccgcgtaccggtcacgctgtttaccaaaggcggcggacagtggctggaagccatggcagaaaccggttgcgatgcgctgggcctcgactggacaacggacatcgccgatgcgcgccgccgtgtgggcaataaagtcgcgttgcagggtaatatggatccgagcatgctgtacgcgccgcctgcccgcattgaagaagaagtagcgactatacttgcaggtttcggtcacggcgaaggtcatgtctttaaccttggtcacggcattcatcaggatgtgccgccagaacatgctggcgtgttcgtggaggcagtgcatcgactgtctgaacagtatcaccgctaaggagtgattatggatctcgcgagtttacgcgctcaacaaatcgaactggcttcttctgtgatccgcgaggatcgactcgataaagatccaccggatctgatcgccggagccgatgtcgggtttgagcagggcggagaagtgacgcgagcggcgatggtgctgctgaaatatcccagccttgagctggtcgagtataaagttgcccgcatcgccaccaccatgccttacattccaggttttctttccttccgcgaatatcctgcgctgctggcagcgtgggagatgctgagccaaaagccggatttagtgtttgtcgatggtcatgggatcagccatcctcgccgtcttggcgtcgccagccattttggcttattggtggatgtgccgaccattggcgtggcgaaaaaacggctctgcggtaaattcgaaccgctctccagcgaaccgggcgcgctggccccactgatggataaaggcgagcagctggcctgggtctggcgcagcaaagcgcgctgtaacccgttgtttatcgctaccggccatcgggtcagcgtggacagcgcgctggcgtgggtacaacgctgcatgaaaggctatcgtctgccggagccaacgcgctgggcggacgcggtggccagcgaacgtccggcgttcgtgcgctatacagcaaatcagccctaattcaggtaaactgcggataatttccgtatttgagaactcaacatgttacaaaacccaattcatctgcgtctggagcgcctggaaagctggcagcatgtcactttcatggcttgcttatgcgaacgcatgtaccccaattacgccatgttctgccagcaaaccggttttggtgatgggcaaatttaccgtcgcattctcgatctcatctgggaaacgctgaccgttaaagacgcaaaagtaaatttcgacagccaactggagaaatttgaagaagcgattcctagtgccgacgatttcgatctgtacggcgtttatccggcaatcgatgcctgcgtggcgttaagtgaactggtccatagccgtttgagtggtgaaacgctcgaacacgcggtggaagtgagtaagacctccatcacgaccgttgcgatgctggaaatgactcaggctggtcgcgaaatgagcgatgaagagcttaaagaaaacccagctgtagagcaagaatgggacattcagtgggaaatattccgacttttagctgagtgcgaagaacgcgatatcgagctgataaaaggccttagggcagacctgcgtgaggcgggtgagagcaatattggtataatttttcagcaataagaccagaaaacgtgatttaacgcctgatttgtcgtacctggagtcttccctttcgcccccgtctggtctacatttggggggcgaaaaaaagtggctatcggtgcgtgtatgcaggagagtgctattctggcatttccgtcgcactcgatgcttagcaagcgataaacacattgtaaggataacttatgaacaagactcaactgattgatgtaattgcagagaaagcagaactgtccaaaacccaggctaaagctgctctggagtccactctggctgcaattactgagtctctgaaagaaggcgatgctgtacaactggttggtttcggtaccttcaaagtgaaccaccgcgctgagcgtactggccgcaacccgcagaccggtaaagaaatcaaaattgccgcagctaacgtaccggcatttgtttctggcaaggcactgaaagacgcagttaagtaagattgcgtggcagtgaacagttttaacgaaggggtggttagtccccttttgtctttctggcgtcgaagtttgatgctggctggcgctctgcttctcactgcctgtagtcataactctagtcttcctccctttaccgccagtggatttgctgaagaccagggcgcggtacgcatctggcgaaaagacagcggcgataatgtgcatctgcttgccgtgtttagcccgtggcgcagtggcgataccacgacgcgagagtatcgctggcagggcgataacctcacgctcatcaatatcaatgtttacagcaaaccgccggtgaatattcgcgcgcgttttgacgatcgcggtgatctgagctttatgcaacgtgaatccgatggggaaaagcagcagctttctaacgaccaaatcgatttataccgttatcgtgctgatcagatccgccagattagcgatgccttacgtcaggggagagtcgtgctgcgccaggggcgctggcatgcgatggaacagaccgtgaccacctgcgaagggcaaaccattaaacctgatttagatagccaggcgatagcgcatatcgagcgccgccagagccgctcttctgttgatgtcagcgtggcatggctggaagcgcccgaaggtagccaattactgttagtggcaaactctgatttctgtcgctggcaacccaacgagaaaacgttctgatttaccagtggcccatacccatatgaccgccaccaccgcagccgccgtagcccatgcccattccggctccgcgcggaatacccgcttcagccatcgcgatatctcgtttcacccgtaactcatctaagctctgacgcaaattctccatctctttggcgaccgcgttaattttgctgctatccggtgggttcgcggctaacagggcattgtattcataacgcttcgtcaccagttgctgttgcagtgcgctgctttgagcgtaaaagtcattatggattttctgccacgctgtctgttgttcgctggtcaaaggcgcggcattttgctgccacataccgtgtccgccgtgagcaaatgcagatgtgcttcccatcgccattgcactaagcgccatcattaccagggcaattttcgtgttccgtttcatggttaatcctccagtggttgtcttacttcgggtattgcatcttccgtgccaacgatgaaacgctgatatgacgggtaatctggcatgataaacgagtaaaaatgactcgcctgctgcgggtagcgagtcatttttactcattgaaacttaagcctttgtgttacagcgcagggtaagcgctgataaaagatggcatgatttctgctgtcagaaagggatgagcaggcaaagaagaagatgcgttttatgcaacgttctaaagactccttagctaaatggttaagcgcgatcctccccgtggtcattgttgggctggtgggattgtttgcggtaactgtgattcgtgattatgggcgggcaagcgaggcagaccgccaggcattactggaaaaaggtaatgtgcttatccgcgctctggagagcggaagccgcgtagggatggggatgcgaatgcaccatgtacagcaacaggcgcttctggaagagatggcgggacagccgggagtgttgtggttcgcagtcaccgatgcgcagggcatcattattcttcatagcgaccccgataaggtcgggcgtgcgctctatagcccggatgaaatgcagaaattaaagccagaggaaaactcccgctggcggctgcttgggaaaacggaaactacgcctgcacttgaggtctatcgtttgttccagccaatgagtgcgccctggcggcatggaatgcacaatatgccgcgctgtaacggcaaagctgtgccacaagtagatgcacaacaggctatttttatcgccgttgatgccagtgatctggttgcaacccagagtggggaaaagcgcaataccctgattatcctcttcgccctggcgacggtcttgctggcaagcgtattgagtttcttctggtatcgccgctatctgcgcagccgccagcttctacaagatgaaatgaagcgcaaagagaagctggtggcgctggggcatcttgcggcaggcgttgcccacgaaatccgtaacccactttccagcattaaaggactggcgaaatactttgccgagcgcgcgcctgcagggggagaagcgcatcaactggcgcaggtgatggcgaaagaggccgaccgtttaaaccgcgtggtaagcgagttgctggaactggttaagccaacgcatctggctttgcaggcggtggatctcaacacgctgattaaccacagtttacagctggtaagtcaggatgcaaacagccgggagatccagttacgctttaccgccaacgacacattaccggaaattcaggccgacccggacaggctgactcaggtcctgttgaatctctatctcaatgctattcaggcgattggtcagcatggcgtgattagcgtgacggccagcgaaagcggcgcgggcgtgaaaatcagcgttaccgacagcggtaagggaattgcggcagatcagcttgatgccatcttcactccgtacttcaccactaaagccgaaggcaccggattggggctggcggtcgtgcataatattgttgaacaacacggtggtacaattcaggtcgcaagccaggagggaaaaggcagtacgttcaccctctggcttccggtcaatattacgcgtaaggacccacaaggatgacgcacgataatatcgatattctggtggtggatgatgacattagccactgcactattttgcaggctttactgcgcggctggggctataacgtcgcgctggcgaacagcgggcgacaggcgttggagcaggtgcgggaacaggtttttgatcttgtgctttgcgatgtgcgaatggcggagatggacggcatcgccacgctgaaagagatcaaagcgttaaacccggcaattccggtgctgattatgactgcgtactccagcgtcgagacggcggtagaggcactgaaaactggggcgctggattatctcatcaagccgctggatttcgataacctacaggcgacgctggaaaaagcgctcgcgcatacgcacagtattgatgctgaaacacctgcggtgactgccagccagttcggtatggtcggtaaaagcccggcgatgcaacacctgctcagtgaaatcgccctcgtcgcgccaagcgaagccacggtactgatccacggcgattccggcaccggtaaagagctggtcgccagggcgattcacgccagtagcgcacgtagcgaaaaaccgctggtaacgctcaactgtgcggcactcaacgaatccttgctggaatctgaattgttcggtcacgaaaaaggggcgtttactggagccgataaacgccgggaagggcgctttgttgaggcggacggcggcacgctgtttctcgatgaaattggcgatatcagcccgatgatgcaggtgcgtctgctgcgtgcgattcaggagcgcgaagttcagcgtgtcggtagcaaccagattatcagcgttgatgtccggctgattgcggcgacccatcgcgatcttgccgcagaggtgaatgccgggcgttttcgccaggatctctactatcgcctgaatgtggtggcgattgaagtaccaagcctgcggcaacggcgggaagatatccctctgctggctggccattttctgcagcgctttgccgagcgtaatcgcaaggcggtaaaaggttttacgccccaggcgatggatctgttgattcattacgactggccgggaaatattcgtgagctggaaaacgcggtggaacgggcagtggtgctgctgaccggggaatatatttccgaacgcgagctgccgctggcgattgccagtacgccgatcccgctgggacaaagtcaggatattcagccgttggtggaagtggaaaaagaggtgattctggcggcgctggagaaaacgggcggcaacaaaaccgaagccgcccgtcagttagggatcacgcgcaaaacgctattggcaaaactgagccgttaattctgctcgcgttcgatagcgcgccagccgatatctttccggcagaagcagtcgtcccagtggatatcggtcattaaggcataggcgcgtttctgcgcttctgccacggtatgacccagcgcggtgacgcacagtacgcgcccgccgttggtcactacctgctcgtcatccgccagttttgtgcccgcgtggaacactttgccgcctgccacttcttccagcggcaggccgtggatcacgtcaccggtgcggtaatcacccggatatccacccgcagccatcaccacgccgagagaagcgcgttcatcccactcggacgttttctcgtccagtttgctttcacaggccgccaggcagagctcaaccagatcggacttcatgcgcagcataatcggctgggtttccggatcgccaaagcggcagttaaattcaataaccttcggattgccctgtttgtcgatcatcaggcccgcgtagagaaaaccggtgtaggtgttgccttccgccgccatgcctttcacggttggccagataatacgttccatggtgcgctgatgaacgtcatcggttactaccggcgcgggggagtaagcgcccatcccgccggtgtttggtccggtatctttatcgcctacgcgtttgtgatcctggctggtagccatcggcagcacatgctcgccgtccaccatcacgataaagctcgcttcttcgccatcgaggaactcttcgataacgatgcgatgacccgcgtcgccaaaagcgttgcccgccagcatatcgtgaacagccgcttccgcttcttccagcgtcatcgccacgataacgcctttcccggcagccagaccgtccgctttaatgacgattggcgcgcctttctcacgcagatacgccagcgcaggttctacctcggtgaagttctggtattccgccgtagggatcttatggcgggccaggaaatctttggtaaacgctttactgccttccagttgggccgcacctgcggttgggtcgaagattttcagcccggcggcgcggaaggtatcgaccacgcctttcaccagcggcgcttccgggccgacgatggtcagatcaatcttttcgttttgtgcgaaatccaacagcgccgggatatcggtcacgccaatagcaacgttttgcagcgcgggttccagtgcagtgcctgcattacccggagcaacaaaaacagtctcaaccagcgggctctgggccgctttccaggccagcgcgtgctcgcgcccgccgttaccaatcactaatactttcatctattgctccattaatggcggaagtggcgcatgtcggtgaagagcatcgcaataccgtgctcgtcggcggcggcaatcacttcgtcatcacggatagaaccgccaggctggattacgcaggtcacgcccgcagcggcggcggcatcaataccgtcgcggaacgggaagaacgcgtcagaagccatgctggaacctttcacttccaggccttcatcggccgctttaataccggcgatttttgcggagtacacgcggctcatctggcccgcgccaatgccgatagtcatattgtttttggcatagacgatagcgttggatttcacaaacttcgccaccttccagcagaacagcgcatcacgcagttcctgttcgctcggctgacgtttggtcaccacgcgcagttcttccgcaccgaccatccccaggtcacgatcctgaaccagcagaccgccgttcacgcgtttgaaatcgaggcccggaacacgctcgccccactgaccgcaggtcagaacgcgtacgttctgtttggcggcggtgattttcagggcttcttcgctggcggacggcgcaataatcacttcgacaaactgacgagaaatgatggcctgtgcggtttccgcatccagctcgcggttaaaggcaatgatgccgccgaatgcggaggttgggtcggttttgtacgcgcgatcgtaagcatcaagaatggaattgccgatagccacgccgcaagggttggcgtgcttcacaatcacacatgccggctcggcgaactctttcacgcactccagcgccgcatcggtatcggcgatgttgttataagagagggctttaccctgaacctgggttgcggtagcaacggaggcttctttcacattctcttctatatagaaggcagcctgctggtggctgttctcgccgtaacgcatatccagcttcttaatgaagttcaggttcagcgtgcgtgggaagcgaccggcggcttctttgctttcaccgtggtaagccggaaccatgctgccgaagtagttggcaatcatgctgtcgtaggcggcagtgtgttcgaaggctttgatggcgaggtcgaaacgggttgcaagcgtcaggcttccttcgttgtcatccatctctttaataatggcgtcatagtcgctgctcttcaccacgattgcgacatctttatggttcttggcggcggagcgcaccatcgttgggccgccgatatcgatgttctcaaccgcatcttccaggctgcaaccttcacgggccacggtctgggcgaacggatacaggttaacaaccaccatatcgataggctggatctgatgttcttccataatggcatcgtcctggccgcgacggcccagaatgccaccatgtactttcggatgcagggtcttcacgcgtccatccatcatctccgggaaaccggtgtaatcggaaacttcggttaccggcagacctttttctgctaacagacgggcagtgccccctgtagacagcagctccacaccgcgtgcggaaagtgcctgggcgaattcgacgataccggctttgtcagaaacactgagcagagcgcggcggactggacgacgttgttgcatggtaaatcccctggatttgactattacagagagcgttagctgaatttttcgcgaaaaactcagctaacgcccctaacggggcatccttatttttcgcccgcattgtaacgaaaacgtttgcgcaacgctcgcgaatttttctctttcaatggtgatcacaattttgactgtggttaccgtgggcaaaatacagaaattacattgatgattgtggataactctgtgcgtaaaaaggtataaagcgggcttttgctggggaatgcagcagtcagtcatttttctgcaatttttctattgcggcctgcggagaactccctataatgcgcctccatcgacacggcggatgtgaatcacttcacacaaacagccggttcggttgaagagaaaaatcctgaaattcagggttgactctgaaagaggaaagcgtaatatacgccacctcgcgacagtgcgctaaagcgcgtcgcaactgctctttaacaatttatcagacaatctgtgtgggcactcgaagatacggattcttaacgtcgcaagacgaaaaatgaataccaagtctcaagagtgaacacgtaattcattacgaagtttaattctttgagcatcaaacttttaaattgaagagtttgatcatggctcagattgaacgctggcggcaggcctaacacatgcaagtcgaacggtaacaggaagaagcttgcttctttgctgacgagtggcggacgggtgagtaatgtctgggaaactgcctgatggagggggataactactggaaacggtagctaataccgcataacgtcgcaagaccaaagagggggaccttcgggcctcttgccatcggatgtgcccagatgggattagctagtaggtggggtaacggctcacctaggcgacgatccctagctggtctgagaggatgaccagccacactggaactgagacacggtccagactcctacgggaggcagcagtggggaatattgcacaatgggcgcaagcctgatgcagccatgccgcgtgtatgaagaaggccttcgggttgtaaagtactttcagcggggaggaagggagtaaagttaatacctttgctcattgacgttacccgcagaagaagcaccggctaactccgtgccagcagccgcggtaatacggagggtgcaagcgttaatcggaattactgggcgtaaagcgcacgcaggcggtttgttaagtcagatgtgaaatccccgggctcaacctgggaactgcatctgatactggcaagcttgagtctcgtagaggggggtagaattccaggtgtagcggtgaaatgcgtagagatctggaggaataccggtggcgaaggcggccccctggacgaagactgacgctcaggtgcgaaagcgtggggagcaaacaggattagataccctggtagtccacgccgtaaacgatgtcgacttggaggttgtgcccttgaggcgtggcttccggagctaacgcgttaagtcgaccgcctggggagtacggccgcaaggttaaaactcaaatgaattgacgggggcccgcacaagcggtggagcatgtggtttaattcgatgcaacgcgaagaaccttacctggtcttgacatccacggaagttttcagagatgagaatgtgccttcgggaaccgtgagacaggtgctgcatggctgtcgtcagctcgtgttgtgaaatgttgggttaagtcccgcaacgagcgcaacccttatcctttgttgccagcggtccggccgggaactcaaaggagactgccagtgataaactggaggaaggtggggatgacgtcaagtcatcatggcccttacgaccagggctacacacgtgctacaatggcgcatacaaagagaagcgacctcgcgagagcaagcggacctcataaagtgcgtcgtagtccggattggagtctgcaactcgactccatgaagtcggaatcgctagtaatcgtggatcagaatgccacggtgaatacgttcccgggccttgtacacaccgcccgtcacaccatgggagtgggttgcaaaagaagtaggtagcttaaccttcgggagggcgcttaccactttgtgattcatgactggggtgaagtcgtaacaaggtaaccgtaggggaacctgcggttggatcacctccttaccttaaagaagcgttctttgcagtgctcacacagattgtctgatagaaagtgaaaagcaaggcgtcttgcgaagcagactgatacgtccccttcgtctagaggcccaggacaccgccctttcacggcggtaacaggggttcgaatcccctaggggacgccacttgctggtttgtgagtgaaagtcacctgccttaatatctcaaaactcatcttcgggtgatgtttgagatatttgctctttaaaaatctggatcaagctgaaaattgaaacactgaacaacgaaagttgttcgtgagtctctcaaattttcgcaacacgatgatgaatcgtaagaaacatcttcgggttgtgaggttaagcgactaagcgtacacggtggatgccctggcagtcagaggcgatgaaggacgtgctaatctgcgataagcgtcggtaaggtgatatgaaccgttataaccggcgatttccgaatggggaaacccagtgtgtttcgacacactatcattaactgaatccataggttaatgaggcgaaccgggggaactgaaacatctaagtaccccgaggaaaagaaatcaaccgagattcccccagtagcggcgagcgaacggggagcagcccagagcctgaatcagtgtgtgtgttagtggaagcgtctggaaaggcgcgcgatacagggtgacagccccgtacacaaaaatgcacatgctgtgagctcgatgagtagggcgggacacgtggtatcctgtctgaatatggggggaccatcctccaaggctaaatactcctgactgaccgatagtgaaccagtaccgtgagggaaaggcgaaaagaaccccggcgaggggagtgaaaaagaacctgaaaccgtgtacgtacaagcagtgggagcacgcttaggcgtgtgactgcgtaccttttgtataatgggtcagcgacttatattctgtagcaaggttaaccgaataggggagccgaagggaaaccgagtcttaactgggcgttaagttgcagggtatagacccgaaacccggtgatctagccatgggcaggttgaaggttgggtaacactaactggaggaccgaaccgactaatgttgaaaaattagcggatgacttgtggctgggggtgaaaggccaatcaaaccgggagatagctggttctccccgaaagctatttaggtagcgcctcgtgaattcatctccgggggtagagcactgtttcggcaagggggtcatcccgacttaccaacccgatgcaaactgcgaataccggagaatgttatcacgggagacacacggcgggtgctaacgtccgtcgtgaagagggaaacaacccagaccgccagctaaggtcccaaagtcatggttaagtgggaaacgatgtgggaaggcccagacagccaggatgttggcttagaagcagccatcatttaaagaaagcgtaatagctcactggtcgagtcggcctgcgcggaagatgtaacggggctaaaccatgcaccgaagctgcggcagcgacgcttatgcgttgttgggtaggggagcgttctgtaagcctgcgaaggtgtgctgtgaggcatgctggaggtatcagaagtgcgaatgctgacataagtaacgataaagcgggtgaaaagcccgctcgccggaagaccaagggttcctgtccaacgttaatcggggcagggtgagtcgacccctaaggcgaggccgaaaggcgtagtcgatgggaaacaggttaatattcctgtacttggtgttactgcgaaggggggacggagaaggctatgttggccgggcgacggttgtcccggtttaagcgtgtaggctggttttccaggcaaatccggaaaatcaaggctgaggcgtgatgacgaggcactacggtgctgaagcaacaaatgccctgcttccaggaaaagcctctaagcatcaggtaacatcaaatcgtaccccaaaccgacacaggtggtcaggtagagaataccaaggcgcttgagagaactcgggtgaaggaactaggcaaaatggtgccgtaacttcgggagaaggcacgctgatatgtaggtgaggtccctcgcggatggagctgaaatcagtcgaagataccagctggctgcaactgtttattaaaaacacagcactgtgcaaacacgaaagtggacgtatacggtgtgacgcctgcccggtgccggaaggttaattgatggggttagcgcaagcgaagctcttgatcgaagccccggtaaacggcggccgtaactataacggtcctaaggtagcgaaattccttgtcgggtaagttccgacctgcacgaatggcgtaatgatggccaggctgtctccacccgagactcagtgaaattgaactcgctgtgaagatgcagtgtacccgcggcaagacggaaagaccccgtgaacctttactatagcttgacactgaacattgagccttgatgtgtaggataggtgggaggctttgaagtgtggacgccagtctgcatggagccgaccttgaaataccaccctttaatgtttgatgttctaacgttgacccgtaatccgggttgcggacagtgtctggtgggtagtttgactggggcggtctcctcctaaagagtaacggaggagcacgaaggttggctaatcctggtcggacatcaggaggttagtgcaatggcataagccagcttgactgcgagcgtgacggcgcgagcaggtgcgaaagcaggtcatagtgatccggtggttctgaatggaagggccatcgctcaacggataaaaggtactccggggataacaggctgataccgcccaagagttcatatcgacggcggtgtttggcacctcgatgtcggctcatcacatcctggggctgaagtaggtcccaagggtatggctgttcgccatttaaagtggtacgcgagctgggtttagaacgtcgtgagacagttcggtccctatctgccgtgggcgctggagaactgaggggggctgctcctagtacgagaggaccggagtggacgcatcactggtgttcgggttgtcatgccaatggcactgcccggtagctaaatgcggaagagataagtgctgaaagcatctaagcacgaaacttgccccgagatgagttctccctgactccttgagagtcctgaaggaacgttgaagacgacgacgttgataggccgggtgtgtaagcgcagcgatgcgttgagctaaccggtactaatgaaccgtgaggcttaaccttacaacgccgaaggtgttttggcggattgagagaagattttcagcctgatacagattaaatcagaacgcagaagcggtctgataaaacagaatttgcctggcggcagtagcgcggtggtcccacctgaccccatgccgaactcagaagtgaaacgccgtagcgccgatggtagtgtggggtctccccatgcgagagtagggaactgccaggcatcaaattagaaaaaccccggtccataaggccggggttttttgcatatcaattatttgcatgatgaagggaatctcatgagtgttctgtatatccaaattcgtcgtaatcaaattactgttcgcgatcttgaaagcaaacgtgaagtgagtggagacgctgccttcagtaaccagcgcctgttaatcgccaatttctttgttgcagaaaaagttctgcaagatcttgttctgcaactccacccacgtagtacctggcattcttttttgccagcaaaacgtatggatattgttgtgagcgcactggaaatgaatgagggcggtttgagtcaggttgaggaacgcattctccatgaagtggtcgctggggcaacgttaatgaaatatcgccagttccacatccatgcgcaaagtgcggtactcagtgatagtgcggtcatggcaatgcttaagcagaaataatcgtgtcaccattggtgggtactaaacctgaagttcagcccaccgggatgagaaaaaatcgcttacgcccccacatacgccagattcagcaacggatacggtttccccaaatcgtccacctcagagcgtcccgtaaccttaaaacccaccttcttatagaacccaaccgcctgctcattttgctcattaacgttggttgtcagttccggtgccatgctgagcgcatgctccaccagcacccgacctacgccgcagccgcgcacatcaggatcgataaacagcgcatccatatgctgcccacttagcaacataaatccaaccggctgatcccgctcattaaccgcgacccacaacggcgcttccggcaggaaggaacgaactaggtcctccagctcggtccgatactctgcacttagaaaatcgtgagtggcatcgacagaacgacaccaaatcgcaacgagttcctccccttcctcatgccgactgcggcgaatactaataaccattttctctccttttagtcattcttatattctaacgtagtcttttccttgaaactttctcaccttcaacatgcaggctcgacattggcaaattttctggttatcttcagctatctggatgtctaaacgtataagcgtatgtagtgaggtaatcaggttatgccgattcgtgtgccggacgagctacccgccgtcaatttcttgcgtgaagaaaacgtctttgtgatgacaacttctcgtgcgtctggtcaggaaattcgtccacttaaggttctgatccttaacctgatgccgaagaagattgaaactgaaaatcagtttctgcgcctgcttagtaacagtcctttgcaggtcgatattcagctgttgcgcatcgattcccgtgaaagccgcaacacgcccgcagagcatctgaacaacttctactgtaactttgaagatattcaggatcagaactttgacggtttgattgtaactggtgcgccgctgggcctggtggagtttaatgatgtcgcttactggccgcagatcaaacaggtgctggagtggagcaaagatcacgtcaccagcacgctgtttgtctgctgggcggtacaggccgcgctcaatatcctctacggcattcctaagcaaactcgcaccgaaaaactctctggcgtttacgagcatcatattctccatcctcatgcgcttctgacgcgtggctttgatgatagtttcctggcaccgcatagccgctatgctgactttccggcagcgttgattcgtgattacaccgatctggaaattctggcagagacggaagaaggggatgcatatctgtttgccagtaaagataagcgcattgcctttatgacgggccatcccgaatatgatgcgcaaacgctggcgcaggaatttttccgcgatgtggaagccggactagacccggatgtaccgtataactatttcccgcacaatgatccgcaaaatacaccgcgagcgagctggcgtagtcacggtaatttactgtttaccaactggctcaactattacgtctaccagatcacgccatacgatctacggcacatgaatccaacgctggattaatcttctgtgatagtcgatcgttaagcgattcagcaccttacctcaggcaccttcgggtgccttttttatttccgaaacgtacctcagcaggtgaataaattttattcatattgttatcaacaagttatcaagtatttttaattaaaatggaaattgtttttgattttgcattttaaatgagtagtcttagttgtgctgaacgaaaagagcacaacgatccttcgttcacagtggggaagttttcggatccatgacgaggagctgcacgatgactgaacaggcaacaacaaccgatgaactggctttcacaaggccgtatggcgagcaggagaagcaaattcttactgccgaagcggtagaatttctgactgagctggtgacgcattttacgccacaacgcaataaacttctggcagcgcgcattcagcagcagcaagatattgataacggaacgttgcctgattttattagcgaaacagcttccattcgcgatgctgattggaaaattcgcgggattcctgcggacttagaagaccgccgcgtagagataactggcccggtagagcgcaagatggtgatcaacgcgctcaacgccaatgtgaaagtctttatggccgatttcgaagatagtctggcaccagactggaacaaagtgatcgacgggcaaattaacctgcgtgatgcggttaacggcaccatcagttacaccaatgaagcaggcaaaatttaccagctcaagcccaatccagcggttttgatttgtcgggtacgcggtctgcacttgccggaaaaacatgtcacctggcgtggtgaggcaatccccggcagcctgtttgattttgcgctctatttcttccacaactatcaggcactgttggcaaagggcagtggtccctatttctatctgccgaaaacccagtcctggcaggaagcggcctggtggagcgaagtcttcagctatgcagaagatcgctttaatctgccgcgcggcaccatcaaggcgacgttgctgattgaaacgctgcccgccgtgttccagatggatgaaatccttcacgcgctgcgtgaccatattgttggtctgaactgcggtcgttgggattacatcttcagctatatcaaaacgttgaaaaactatcccgatcgcgtcctgccagacagacaggcagtgacgatggataaaccattcctgaatgcttacagtcgcctgttgattaaaacctgccataaacgcggtgcttttgcgatgggcggcatggcggcgtttattccgagcaaagatgaagagcacaataaccaggtgctcaacaaagtaaaagcggataaaagcctggaagccaataacggtcacgatggcacatggatcgctcacccaggccttgcggacacggcaatggcggtattcaacgacattctcggctcccgtaaaaatcagcttgaagtgatgcgcgaacaagacgcgccgattactgccgatcagctgctggcaccttgtgatggtgaacgcaccgaagaaggtatgcgcgccaacattcgcgtggctgtgcagtacatcgaagcgtggatctctggcaacggctgtgtgccgatttatggcctgatggaagatgcggcgacggctgaaatttcccgtaccagcatctggcagtggatccatcatcaaaaaacgttgagcaatggcaaaccggtgaccaaagccttgttccgccagatgctgggcgaagagatgaaagtcattgccagcgaactgggcgaagaacgtttctcccaggggcgttttgacgatgccgcacgcttgatggaacagatcaccacttccgatgagttaattgatttcctgaccctgccaggctaccgcctgttagcgtaaaccaccacataactatggagcatctgcacatgaaaacccgtacacaacaaattgaagaattacagaaagagtggactcaaccgcgttgggaaggcattactcgcccatacagtgcggaagatgtggtgaaattacgcggtagtgtcaatcctgaatgcacgctggcgcaactgggcgcagcgaaaatgtggcgtctgctgcacggtgagagcaaaaaaggctacatcaacagcctcggcgcactgactggcggtcaggcgctgcaacaggcgaaagcgggtattgaagcagtctatctgagcggatggcaggtagcggcggacgctaacctggcggccagcatgtatccggatcagagcctctatccggcaaacagcgtgccagctgtggtggagcggatcaacaacaccttccgtcgtgccgatcagatccaatggtccgcgggcattgagccgggcgatccgcgctatgtcgattacttcctgccgatcgttgccgatgcggaagccggttttggcggtgtcctgaatgcctttgaactgatgaaagcgatgattgaagccggtgcagcggcagttcacttcgaagatcagctggcgagtgtgaagaaatgcggtcacatgggcggcaaagttttagtgccaactcaggaagctattcagaaactggtcgcggcgcgtctggcagctgacgtgacgggcgttccaaccctgctggttgcccgtaccgatgctgatgcggcggatctgatcacctccgattgcgacccgtatgacagcgaatttattaccggcgagcgtaccagtgaaggcttcttccgtactcatgcgggcattgagcaagcgatcagccgtggcctggcgtatgcgccatatgctgacctggtctggtgtgaaacctccacgccggatctggaactggcgcgtcgctttgcacaagctatccacgcgaaatatccgggcaaactgctggcttataactgcagcccgagcttcaactggcagaaaaacctcgacgacaaaactattgccagcttccagcagcagctgagcgatatgggctacaagttccagttcatcaccctggcaggtatccacagcatgtggttcaacatgtttgacctggcaaacgcctatgcccagggcgagggtatgaagcactacgttgagaaagtgcagcagccggaatttgccgccgcgaaagatggctataccttcgtatctcaccagcaggaagtgggtacaggttacttcgataaagtgacgactattattcagggcggcacgtctagtgtcaccgcgctgaccggctccactgaagaaagccagttctaagcaacaacaaccgttgctgactgtaggccggataaggcgttcacgccgcatccggcaatcggtgcacgatgcctgatgcgacgcttgcgcgtcttatcatgcctacagccgttgccgaacgtaggctggataaggcgtttacgccgcatccggcaattctctgctcctgatgagggcgctaaatgccgcgtggcctggaattattgattgctcaaaccattttgcaaggcttcgatgctcagtatggtcgattcctcgaagtgacctccggtgcgcagcagcgtttcgaacaggccgactggcatgctgtccagcaggcgatgaaaaaccgtatccatctttacgatcatcacgttggtctggtcgtggagcaactgcgctgcattactaacgaccaaagtacggacgcggcatttttactacgtgttaaagagcattacacccggctgttgccggattacccgcgcttcgagattgcggagagcttttttaactccgtgtactgtcggttatttgaccaccgcagccttactcccgagcggctttttatctttagctctcagccagagcgccgctttcgtaccattccccgcccgctggcgaaagactttcaccccgatcacggctgggaatctctactgatgcgcgttatcagcgacctaccgctgcgcctgcgctggcagaataaaagccgtgacatccattacattattcgccatctgacggaaacgctggggacagacaacctcgcggaaagtcatttacaggtggcgaacgaactgttttaccgcaataaagccgcctggctggtaggcaaactgatcacaccttccggcacattgccatttttgctgccgatccaccagacggacgacggcgagttatttattgatacctgcctgacgacgaccgccgaagcgagcattgtttttggctttgcgcgttcttattttatggtttatgcgccgctgcccgcagcgctggtcgagtggctacgggaaattctgccaggtaaaaccaccgctgaattgtatatggctatcggctgccagaagcacgccaaaaccgaaagctaccgcgaatatctcgtttatctacagggctgtaatgagcagttcattgaagcgccgggtattcgtggaatggtgatgttggtgtttacgctgccgggctttgatcgggtattcaaagtcatcaaagacaggttcgcgccgcagaaagagatgtctgccgctcacgttcgtgcctgctatcaactggtgaaagagcacgatcgcgtgggccgaatggcggacacccaggagtttgaaaactttgtgctggagaagcggcatatttccccggcattaatggaattactgcttcaggaagcagcggaaaaaatcaccgatctcggcgaacaaattgtgattcgccatctttatattgagcggcggatggtgccgctcaatatctggctggaacaagtggaaggtcagcagttgcgcgacgccattgaagaatacggtaacgctattcgccagcttgccgctgctaacattttccctggcgacatgctgtttaaaaacttcggtgtcacccgtcacgggcgtgtggttttttatgattacgatgaaatttgctacatgacggaagtgaatttccgcgacatcccgccgccgcgctatccggaagacgaacttgccagcgaaccgtggtacagcgtcagcccgggcgatgttttcccggaagagtttcgccactggctatgcgccgacccgcgtattggtccgctgtttgaagagatgcacgccgacctgttccgcgctgattactggcgcgcactacaaaaccgcatacgtgaagggcatgtggaagatgtttatgcgtatcggcgcaggcaaagatttagcgtacggtatggggagatgcttttttgagtaaagcttccatataatttttctccgcaatgtatcgagggttatccgtaaagccaaagctttcagccatcttatttaatgtattaaggattaattcagcaataacccggtgaccaaattcaaaagccaactcaaaggcagagtatttttgtggggctttgtgttgccaaaaatccataatatcttcagcggtaaatccaaacaggcgtgcatggtcagataaagcaagataaaccgtctctacaacattttgttgtttatgctgtatcgcactaaacaaaccgggatattcattagaattatttgccaggaggaggggcttcatattttttttatcgaatttaaacgtattaaacagagtgggtaatgcgttaaaaatagtattaataacgttcatgtgtccgcgctgcatggccataaacaaacccgtgtcgcgcgcaagacttttagcggtcagaagatctacaatatcggaagcactaatgttaatttcctgggctaggctgggcaatgcttcaagaataactttcacgatatcgctatgtccattttgcatcgccagatatagtcctgggcaaccataaaaatcctttgccttcaggagatcgagtacctgttctttagtcaaatgacatgtgcgaattaacaaaggtaacgcgttcaaaacaattttcagcatgtcggcatcaccattcgccataacatggtataaaacatggctggacgttctatttttggcactcaggaatttatacacttgttcgttatctaaatgatgtgttgcggccagtttaggtaaggcgttcagaatgctggttacaacatttttatccttacgacttatcgctaaaaataatccagaaaaaccatttttatcttttgcctccagaatatgcatgagattttttttgctgagtaatccttcatatcctgtttcactcaaactattgaaaatagtctcaacgatatccgcattaccataatttatagccaaatataaacctggcaggttaatactattataggcagtcaacatttctgttctatgtagttctggcattttctggagttgaatcatcagttgcgtaagttggtgattctgaccaattgccattagcaaattcatcgttgcaggacttaatggaggggttatttcatccacagatccttttaacatcaatagctgttctttcggaagtgctggaattattgcaacagattgattaataacatgatcattactccatttcaggaggctataatctacattcataaaatccatcagagaatagtgtttaatattctctttgctttcgctcataattcttattttatcgttagttacattaggatcataaacgctaaccacgtaatgggtacatccttcagttgtgttctttattcttagccggaccgtcaaagcatggttatccaccagtaatatggctgccataacactgatgccattactttccatcttgtcaaaatatgctttcataactagcccgaaatcaccgcaggcagcaacgcaacgcccctcaggacggctggaaaccaacgccaaagtctggtttttgcattttttgttgaagtgcgtgagaaatttttcagcactagagtaatcatcttgatggggtttgtaatcaacattctgataaatatcattaatatattgtgcagcaatgtgtcggcatactatacggttttggggtcgccccggaaaataacattgaccattaagtttaattcttgggaattctttttcttttctatcactttttaggtttaattcttgtttatcaagagtgtcactgcgttgaggtaaaatttccattaggtatttttcaaatattggggcaatggtttgagtaagtgtcgtgttttcgtttttattaattatcgtaatttctttcttatcagcttgtaagacggacgtggaaaatttaatgacaaaatccttgttgctaaagatatgacgaccattttgtctacagttctcactgaagctttttaatagaggcgtcgccagctccttgccagaaaatttatcctcgagttctttataaaacaattcactcagggtttggtgttcatttgtctgggctgtattattaatatttgcagagaaagaactacgaggaatacgagtaatcatttaaatatctcattgtttattgatgtcttgaattttaactatcagaacagtgaaaaaatttaatatgattacaactaaagaaatatcataaatcgctcaatctcataatgcagccgtaaaagtttcggtggaatgagatcttgcgattttgttaataattaagtggtttgatgtttaaaaataatgctgagttaataaaagtgtgtgaagtgtatgacattaagttattttggcgtcaatgcgattaacagacacccttattctattgccactcaggtatgatgggcagaatattgcctctgcccgccagaaaaagtcagcgcattccaccgtacgccagcgtcacttccttcgccgctttaatcaccatcgcgccaaactcggtcacgcggtcatcggtaatacgactaatcggtccggaaatagaaattgcggcaaacggttcacggtgctcatcgaaaatacacgctgcaaggcaacgtagccccagtgcatgttcctcatcgtcaaaactataaccccgtttgcgcgtttgggcgagatcttcttttaaatgcacaggagacaccagcgttgcgtgggtataggcatgtaaccctttgcggtgcagcagcttcgtcacctgttcttcgctcagttgggctaaaaaggctttacccgcaccggaagcgtgcatcggcaatttaccgccgataggcgcggacattcgcatcagatgcgtacactgtacctggtcgataataatcgcttcgtgatcgctttgatcaagcaccgccatattgaccgtttcgccagactcttccattagattgcgcaggatagggtgaacaatcgctaacaaattacggctctggagaaagctgctgccgaccataaaggcatgtgcgccgattgcccaatgtcccagttcgccaacctgacgcacgaaaccctgctgttgcatcgtggttagcaggcggtgggtcgtggaattgggtaacccggcttgttgcgccagttccgtgagtgccacactgccattggattcggcaatccactccagtaatttcaggccacgcgttaaagactgaacctgtccagtcgctggtgcggtggcaacggcgggttttctgccgcgtttcgcgggaatgggtgcgaccatgacagtctcttttttctgtatcgtggaaatcattttcatttttattgttagctaatgcaatagttactgaactgatccgatgagttaatgttgaacaaatctcatgttgcgtggtggtcgcttttaccacagatgcgtttatgccagtatggtttgttgaatttttattaaatctgggttgagcgtgtcgggagcaagtgtgagcagcaaagtggaacaactgcgtgcgcagttaaatgaacgtattctggtgctggacggcggtatgggcaccatgatccagagttatcgactgaacgaagccgattttcgtggtgaacgctttgccgactggccatgcgacctcaaaggcaacaacgacctgctggtactcagtaaaccggaagtgatcgccgctatccacaacgcctactttgaagcgggcgcggatatcatcgaaaccaacaccttcaactccacgaccattgcgatggcggattaccagatggaatccctgagcgcggaaatcaactttgcggcggcgaaactggcgcgagcttgtgctgacgagtggaccgcgcgcacgccagagaaaccgcgctacgttgccggtgttctcggcccgaccaaccgcacggcgtctatttctccggacgtcaacgatccggcatttcgtaatatcacttttgacgggctggtggcggcttatcgagagtccaccaaagcgctggtggaaggtggcgcggatctgatcctgattgaaaccgttttcgacacccttaacgccaaagcggcggtatttgcggtgaaaacggagtttgaagcgctgggcgttgagctgccgattatgatctccggcaccatcaccgacgcctccgggcgcacgctctccgggcagaccaccgaagcattttacaacagtttgcgccacgccgaagctctgacctttggcctgaactgtgcgctggggcccgatgaactgcgccagtacgtgcaggagctgagtcggattgcggaatgctacgtcaccgcgcacccgaacgccgggctacccaacgcctttggtgagtacgatctcgacgccgacacgatggcaaaacagatacgtgaatgggcgcaagcgggttttctcaatatcgtcggcggctgctgtggcaccacgccacaacatattgcagcgatgagtcgtgcagtagaaggattagcgccgcgcaaactgccggaaattcccgtagcctgccgtttgtccggcctggagccgctgaacattggcgaagatagcctgtttgtgaacgtgggtgaacgcaccaacgtcaccggttccgctaagttcaagcgcctgatcaaagaagagaaatacagcgaggcgctggatgtcgcgcgtcaacaggtggaaaacggcgcgcagattatcgatatcaacatggatgaagggatgctcgatgccgaagcggcgatggtgcgttttctcaatctgattgccggtgaaccggatatcgctcgcgtgccgattatgatcgactccagtaaatgggacgtcattgaaaaaggtctgaagtgtatccagggcaaaggcattgttaactctatcagcatgaaagagggcgtcgatgcctttatccatcacgcgaaattgttgcgtcgctacggtgcggcagtggtggtaatggcctttgacgaacagggacaggccgatactcgcgcacggaaaatcgagatttgccgtcgggcgtacaaaatcctcaccgaagaggttggcttcccgccagaagatatcatcttcgacccaaacatcttcgcggtcgcaactggcattgaagagcacaacaactacgcgcaggactttatcggcgcgtgtgaagacatcaaacgcgaactgccgcacgcgctgatttccggcggcgtatctaacgtttctttcagcttccgtggcaacgatccggtgcgcgaagccattcacgcagtgttcctctactacgctattcgcaatggcatggatatggggatcgtcaacgccgggcaactggcgatttacgacgacctacccgctgaactgcgcgacgcggtggaagatgtgattcttaatcgtcgcgacgatggcaccgagcgtttactggagcttgccgagaaatatcgcggcagcaaaaccgacgacaccgccaacgcccagcaggcggagtggcgcagctgggaagtgaataaacgtctggaatacagcctggtcaaaggcattaccgagtttatcgagcaggataccgaagaagcccgccagcaggctacgcgcccgattgaagtgattgaaggcccgttgatggacggcatgaatgtggtcggcgacctgtttggcgaagggaaaatgttcctgccacaggtggtcaaaagcgcgcgcgtcatgaaacaggcggtggcctacctcgaaccgtttattgaagccagcaaagagcagggcaaaaccaacggcaagatggtgatcgccaccgtgaagggcgacgtccacgacatcggtaaaaatatcgttggtgtggtgctgcaatgtaacaactacgaaattgtcgatctcggcgttatggtgcctgcggaaaaaattctccgtaccgctaaagaagtgaatgctgatctgattggccttagcgggcttatcacgccgagcctggacgagatggttaacgtggcgaaagagatggagcgtcagggcttcactattccgttactgattggcggcgcgacgaccagtaaagcgcacacggcggtgaaaatcgagcagaactacagcggcccgacggtgtatgtgcagaatgccagccgtaccgttggtgtggtggcggcgctgctttccgatacccagcgcgatgattttgtcgctcgtacccgcaaggagtacgaaaccgtacgtattcagcacgggcgcaagaaaccgcgcacaccaccggtcacgctggaagcggcgcgcgataacgatttcgcttttgactggcaggcttacacgccgccggtggcgcaccgtctcggcgtgcaggaagtcgaagccagcatcgaaacgctgcgtaattacatcgactggacaccgttctttatgacctggagcctggccgggaagtatccgcgcattctggaagatgaagtggtgggcgttgaggcgcagcggctgtttaaagacgccaacgacatgctggataaattaagcgccgagaaaacgctgaatccgcgtggcgtggtgggcctgttcccggcaaaccgtgtgggcgatgacattgaaatctaccgtgacgaaacgcgtacccatgtgatcaacgtcagccaccatctgcgtcaacagaccgaaaaaacaggcttcgctaactactgtctcgctgacttcgttgcgccgaagctttctggtaaagcagattacatcggcgcatttgccgtgactggcgggctggaagaggacgcactggctgatgcctttgaagcgcagcacgatgattacaacaaaatcatggtgaaagcgcttgccgaccgtttagccgaagcctttgcggagtatctccatgagcgtgtgcgtaaagtctactggggctatgcgccgaacgagaacctcagcaacgaagagctgatccgcgaaaactaccagggcatccgtccggcaccgggctatccggcctgcccggaacatacggaaaaagccaccatctgggagctgctggaagtggaaaaacacactggcatgaaactcacagaatctttcgccatgtggcccggtgcaagcgttagcggttggtacttcagccacccggacagcaagtactacgctgtagcacaaattcagcgcgatcaggttgaagattatgcccgccgtaaaggtatgagcgttaccgaagttgagcgctggctggcaccgaatctggggtatgacgcggactgattcacaaatctgtcacttttccttacaacaaacagggcgctcaatgagtgccctgtctctttattaatatgaaacacttatactggaaacaggctggaataatcttagccggaaaaacgaatgtcaaaaggcacagtaaagatgccagtcagcgtgtttccggtcctttggtcattcaattgcttcaggaacatataacgataaggagaacctgaactcgtgttaacgctgcttcacctgctttctgccgtcgccctgctggtctgggggactcatattgttcgaaccggcgtaatgcgcgtcttcggcgcgcgtttgcgtactgtccttagccggagcgtcgaaaaaaagccgctcgccttttgcgcggggatcggcgttaccgcactggtacagagcagtaatgccaccaccatgctggtgaccagctttgtcgctcaggatctggtagccctcgcaccggctctggtcattgtgctgggtgcagatgtcgggacggcgctaatggcgcgtattctcaccttcgacttatcctggctgagtccgttacttatttttatcggcgtgatttttttcctcggacgcaaacagagtcgcgccgggcaactgggccgcgtcggtattggtcttgggctgattttgctagcgctggagttgattgtgcaggccgtaacgccgatcacccaggcaaacggcgttcaggtgatctttgccagcctgaccggcgatattctgctggatgcgctgattggcgcgatgttcgccattatcagctactccagccttgctgctgtactgctgaccgcgactctgaccgccgcaggcattatctccttccccgtggcgctctgtctggtgattggtgctaacctcggttccggtctgctggcaatgctcaacaacagtgccgccaatgccgcagcccgccgtgtcgcgctgggtagtctgctgtttaagctggtgggtagcctgattatcctgccgtttgtccatttgctggcagagacaatggggaagttgagtttgccaaaagcggaactggtgatctatttccacgtcttctacaaccttgtacgttgcctggtcatgctgccatttgttgacccgatggcacggttttgcaaaacgattattcgcgatgaaccggaactggatacccagctacggcctaaacatctggatgtcagcgcgctggatacgcccacgcttgctctggcgaacgccgcgcgcgaaaccctgcgcattggcgacgccatggaacagatgatggaagggttgaataaagtgatgcacggtgagccacggcaggagaaagagctgcgtaagctggcagatgatatcaacgttctctacaccgccattaagctgtatctggcgcggatgccaaaagaagagctggcggaggaagagagccgccgctgggcagagatcatcgaaatgagcctcaaccttgaacaggcctccgatatcgtcgagcgcatgggcagcgaaattgctgacaaaagtctggcagcacggcgggcatttagccttgatgggttgaaggaactggatgcgctctatgagcaattgctcagtaatttaaagctggcaatgagcgtgttcttctctggcgatgtcaccagcgctcgtcgtttgcgtcgcagcaaacatcgttttcgcattcttaatcgccgctattcccacgcccacgtcgatcgcctgcatcagcaaaacgtgcagagcattgaaaccagtagcctacatttaggcttactgggagatatgcagcgcctgaacagcctgttttgtagcgtggcttacagtgtgctggaacagccggatgaagatgaaggacgggacgagtattaatattgtgaatcctgtaggcctgataagacgcgtcaagcgtcgcatcaggcactatgaacaagatgccggatcatgcatccggcaattcacttaaaaacggtgaccagcttccagcggaaccgcttcttcaccagccttaaacacataagtggtgttcgggccacccagcgtagcgtgacctttactcactgtgatccagttaccttccggtagaccaataatcgtcagttctggcgcgacgaccagcagttcgcgaatacgctgctcacgggtttcacctttatggccttccggcagcgcgttggtgaagtgcgggttgatttgcagcgggaacagatttagcgcatcgaaaccttgcggatcgacaatcggcatatcgttggtggtacgaatagttgggcaagcaaggttagcgcctgcgctccagccaatatacagagcgccacgtttaaccacgtcagtaattggtgccagcagcccgcgctcgcggcactgtttcagcaactggaaagtattcccgccgccgacaatcacgatctcagcattttcaatcgcggcaacgggatcgacaacgctatgaataccggtgacagaaacacccagcggagcgagaaccgcagccgttttcgctgtgtaatcatcccaggtctgcgttacgccagcgaaagggataaacaccgcactgcggcgaccctgcaactgttcagcaattagcggcagtgcatgttccagccaggctttacccggcagcgtgctgttactcaataaaagcagttccattacttctccggttagtaagaaatcacgggaggcatgctaccactgcgaatttaaccacttactgacatggctcacgatgtcgcacattgcttctggaaagtgatttgagcaggtaacgaattcaagccaatggaaataacaaatagttcgctcatgactattttttatcaacccaaaggtacggtatattccgttttttacaggagaatttatgctgcccgacagtagtgtccgtttaaataaatacatcagcgaaagcggaatttgcagtcgccgcgaagcggatcgctatatcgagcaaggcaatgtgttccttaatggcaagcgagccaccattggcgatcaggtgaaacccggcgacgttgtgaaagtaaacggtcagttgattgaacctcgggaagccgaagatttggtacttatcgccctgaacaagcccgttggtattgtaagcaccaccgaagatggcgagcgcgataacattgtcgatttcgttaaccacagcaaacgcgtgttcccgattggccgcctggataaagactcccaggggctgattttcctcaccaatcacggcgatctggtgaataagatcctgcgtgctggcaatgatcatgagaaagagtatctggtgacggtcgataaaccgattaccgaggagtttattcgcggcatgagtgcgggggtgccaatcctcgggacagtgaccaaaaagtgcaaagttaaaaaagaagcgccgtttgtcttccgcattaccctggtgcaggggctgaaccgtcagatccggcgcatgtgcgagcatttcggctatgaagtgaaaaagctggaacgcacgcgcatcatgaacgttagcttaagcggcattccgctgggggaatggcgcgatttaaccgacgatgagttaatcgacctctttaagctcattgaaaattcctcttccgaggtaaaacctaaagcgaaggccaaaccgaaaacagcgggcatcaaacgtccagtcgttaagatggaaaaaacggcggaaaaaggcggtcgcccggcgtccaacggtaagcgttttaccagcccggggcgtaaaaagaaggggcgctgattaacgcctcagactgatgaaaacggcccaaaagtgcccggacagtcccctcgccccttcgggaaaagggttagggtgaggggaaaattgtgttcacactgacgagtgaaaatctcaggcgttgattgtggattagcgcctgccgcgcgtgctcgtatttgcactccagctaaaactcgcttcaggatccggtttataagcctgctttttcttcaactggcgggcttttttcgcttcagcctcacgctcaaccattaatttatcgatgtaatctttcttaatgctgttggtttcggagttggtcaatacgcgaccatgcgcaatccgcgcccgatccagcagtgttttaagttcacgctgctcgcgttcagtcatctctttttgggtaatacgggggagtgccatgatggtgccctcagtgagccagagagttcagtgtacgggaattcgtttgcgagcagaactgataatattcattttgccttctcttaactatttatctctttcgataattaattagagatgcagataaaaaaattaaaggcaattattctccgataaagacgctggttaacagagtacaggctcgtttattgatgagcatagtgacaagaaaatcaatacggcccgaaatatagcttccaggccatacagtatttactcaaacaaattactatgcagtttttgcaccacctgctcggcatcttcgccgggcaccaggaagcacaggttatggctggatgcgccataacaaatcatgcgaatgttgaacggttccagtacgccgaatacctctttgccaacgccgcaggctttactcaggtcattgccaatcaacgcgaccagcgccagaccttcttccacctccacccgacacagtgcggaaagctccatcagcagagattgcgtcagcaacgtatcgccagtggaggtactaccggtggtatcaagggttaatgccacgctcacttcactcgtggtgattaagtctacgctaatattatgccgcgcgaggatgccgaaaacttccgcgaggaaaccgcgagaatgcagcatattcaggctgtgcaaagtgagcagagtctgattgcgacgaagcgccagagcgcggaacagcggcggattttcagttttattgcacaccagcgtaccacctgcgcgtgggtctttgctggagccgacaaagaccgggatatcgctgcgtactgcgggtagcaacgttgccggatgcagtacttttgcaccaaaagttgccatctctgccgcttcggcaaacgcgatttcatcaatgcgttttgctgcggaaactacgcgtggatcggtggtgtagatgcccgggacgtcggtccagatatcaacacgagatgcgtgtaaagcctccgccagcaaggctgccgtataatcgctgcctccacggccaagcgtcgttgtacgacctttattttcgctaccgataaatccctgggtgatcactaagccttcattgagacgtgggagcagctgcagcgcggccagttccgccagcgcggctatatctggctctgcacgaccaaatcggtcgttggtacgcatcactttacgtacatcaaaccactgtgcctgaacatcgcgttcgcgcaggatctcaacaaacagcagggtgctcatcagctcgccgtggctgaccagctcatctgtcagcgccggagacgttgccagcgccgccgcttctgccagaacagtaatgttctccagcagacgttcaatctcttcacggataacgttcgggtaacgcagacgttccagaatggcaaactggatgttgcggatagcgtcgagtttttcgaatcgctcgccaggttccagtccttcagctaaagcgaccagcagattagtgataccagcagaagcgctgaggacaactaaacgcacgttggcatcagaaagcacaatatcagcgctgcggttcatggcgtcaaaatcagctacgctggtaccgccaaatttggagacaacaatttcagacataactacctcgtgtcaggggatccattttcagccttggcacaagggaagagcggaagacgggtgggcgcagagcgatacttcgctactattttcacccagaagtgctccaccacttgcgaaacgcccgactgcgaacgcttctggtgacaacccaggggattcagcccctgtagccgatgatgaacgtggccagccgttcaatcacctcggcgatgcaccccctcaggtgttatcacaggactggctcctccaacaccgttacttgggcaacgcgcctcttctggcctgcgctagcgcaggtagtacatttataaataaagggtgagcggggcggttgtcaacgatggggtcatgcggatttttcatccactcctggcggtcagtagttcagctaataaatgcttcactgcgctaagggtttacactcaacattacgctaacggcactaaaaccatcacatttttctgtgactggcgctacaatcttccaaagtcacaattctcaaaatcagaagagtattgctaatgaaaaacatcaatccaacgcagaccgctgcctggcaggcactacagaaacacttcgatgaaatgaaagacgttacgatcgccgatctttttgctaaagacggcgatcgtttttctaagttctccgcaaccttcgacgatcagatgctggtggattactccaaaaaccgcatcactgaagagacgctggcgaaattacaggatctggcgaaagagtgcgatctggcgggcgcgattaagagcatgttctctggcgagaagatcaaccgcactgaaaaccgcgccgtgctgcacgtagcgctgcgtaaccgtagcaataccccgattttggttgatggcaaagacgtaatgccggaagtcaacgcggtgctggagaagatgaaaaccttcagtgaagcgattatttccggtgagtggaaaggttataccggcaaagcaatcactgacgtagtgaacatcgggatcggcggttctgacctcggcccatacatggtgaccgaagctctgcgtccgtacaaaaaccacctgaacatgcactttgtttctaacgtcgatgggactcacatcgcggaagtgctgaaaaaagtaaacccggaaaccacgctgttcttggtagcatctaaaaccttcaccactcaggaaactatgaccaacgcccatagcgcgcgtgactggttcctgaaagcggcaggtgatgaaaaacacgttgcaaaacactttgcggcgctttccaccaatgccaaagccgttggcgagtttggtattgatactgccaacatgttcgagttctgggactgggttggcggccgttactctttgtggagtgcgattggcctgagcattgttctctccatcggctttgataacttcgttgaactgctttccggcgcacacgcgatggacaagcatttctccaccacgcctgccgagaaaaacctgcctgtactgctggcgctgattggcatctggtacaacaatttctttggtgcggaaactgaagcgattctgccgtatgaccagtatatgcaccgtttcgcggcgtacttccagcagggcaatatggagtccaacggtaagtatgttgaccgtaacggtaacgttgtggattaccagactggcccgattatctggggtgaaccaggcactaacggtcagcacgcgttctaccagctgatccaccagggaaccaaaatggtaccgtgcgatttcatcgctccggctatcacccataacccgctctctgatcatcaccagaaactgctgtctaacttcttcgcccagaccgaagcgctggcgtttggtaaatcccgcgaagtggttgagcaggaatatcgtgatcagggtaaagatccggcaacgcttgactacgtggtgccgttcaaagtattcgaaggtaaccgcccgaccaactccatcctgctgcgtgaaatcactccgttcagcctgggtgcgttgattgcgctgtatgagcacaaaatctttactcagggcgtgatcctgaacatcttcaccttcgaccagtggggcgtggaactgggtaaacagctggcgaaccgtattctgccagagctgaaagatgataaagaaatcagcagccacgatagcagcaccaatggtctgattaaccgctataaagcgtggcgcggttaatcatcgtcgatatgtaggccggataaggcgttcacgccgcatccggcaaccgatgcctgatgcgacgcggtcgcgtcttatcaggcctacaggtcgatgccgatatgtacatcgtattcggcaattaatacatagcacgattgattaaataaccttaataacaatgccgacgttatgtcggcatttttttatcagataaatccccttgtctgtaatttaacggaaatcataccgtgaggttaatcctaaaatagatttttaatcgttgtttatttcggaaaatacgcagattaattgcttttgtttttattttaagtttatgatttttattgttatttaaatataagttgaaacttatatttgatattcattccaattatcctaaaacgccatcgctaattccccgcgccgtaattcgcatgctttagttgtgtatactcgatcccgcccgaaatgtttttgggtaaatctccattcattcaatgaagggaaattgttatgaaaaaagttctgtatggcatttttgccatatctgcgcttgcggcgacttctgcgtgggctgcacctgtacaggtgggcgaagcggcagggagcgcagcaacgagcgttagcgcggggagttcctccgcgaccagcgtcagcaccgtaagcagcgcggtgggtgtcgcgcttgcggcaaccggtggcggtgatggttctaataccgggaccaccacaaccacgaccaccagtacccagtaataaagtatgtatccccaaaataattcgagtcattgcatctgtggctagaagtatgaagggattaaccataaccacactccggtgtggttattctgcccctctggagaagagtcgtgaagcgacctgcactcattcttatctgcctgttattacaggcctgtagtgccacgactaaagagctgggcaatagtctgtgggacagtctgttcggcacgccaggcgtacagctgacggatgatgatattcaaaatatgccctacgccagccagtacatgcagcttaatggcgggccgcagttatttgtggtgctggccttcgctgaagacggacaacaaaaatgggtcactcaggatcaggctactctcgttacccaacatggccgtctggtgaagactctgctcggcggcgacaacctgattgaagtgaataaccttgctgccgacccgctgattaaacccgcacaaatcgttgatggcgcaagctggacgcgcacgatgggctggaccgagtaccagcaggtacgctacgccaccgcacgcagtgtcttcaaatgggatggcaccgataccgtcaaagtcggcagcgatgaaaccccggttcgcgtgctggacgaagaagtctccaccgaccaggcgcgctggcataaccgctattggatcgacagcgaagggcaaattcgccagagcgaacagtatctcggcgcggattattttccggtgaaaaccactctcatcaaggcggcaaaacaatgattaaacaaactattgtcgcgttgcttttgagtgtgggagcgagtagcgtcttcgcggcaggaaccgtcaaggtgttcagcaatggcagcagtgaggccaaaacgctaacgggcgcagagcatttaatcgatctggtaggccaaccgcggctggcaaacagctggtggcccggtgcggtgattagcgaagagctggcaacggcggcagcattgcgtcagcagcaggcgttgctgacacggctggcagaacagggcgcagattccagcgccgacgatgccgctgcgattaacgccttacgccagcaaattcaggcgttgaaagtgacgggcaggcaaaaaatcaatcttgatcccgatatcgtccgcgttgccgaacgcggtaacccgccgttgcagggcaactacacgctgtgggtcggaccaccgccgtccacggtcacgttgttcgggcttatcagccgtcctggcaagcagccattcactccaggtcgcgacgtggcgagctatctctctgaccagagcctgctcagcggtgcggatcgcagctacgcgtgggtggtttacccggacggacgcacgcaaaaagcgccggtggcttactggaacaagcgtcacgtagagccgatgcccggcagcattatttatgttggcctcgcggactccgtctggagtgagacgcctgatgcccttaacgccgacattcttcagactctgacgcagcggatacctcaataatgaaaaaaagacatctgcttagcttactggcgctgggcattagcacagcttgctacggcgaaacatatcctgcgcccattggtccgagccagagcgatttcggtggcgtaggattattacaaacgcccaccgcgcgtatggcacgggaaggggagttgagtctgaactatcgcgataacgatcagtaccgttattacagtgctagtgtgcaactcttcccgtggctggaaacaacgctgcgctacaccgacgtgcgcacccggcagtacagcagcgtcgaagcgttctctggcgatcaaacgtataaagataaagccttcgatctcaaactgcgtttgtgggaagagagttactggctgccgcaagtggcggttggtgcgcgggatatcggcggtacggggctgtttgatgcggaatatcttgttgccagcaaagcctgggggccgttcgattttacgctcggcctgggctgggggtatttgggcaccagcggtaatgtgaaaaatccgctctgtagtgccagtgataaatattgctatcgcgataacagctacaaacaggcgggatctatcgacggtagccagatgttccacggtcctgccagtctgtttggcggcgtggaataccagacgccctggcaaccgctgcgcctgaaactggagtatgaaggcaataattatcagcaggattttgccgggaagctggagcaaaaaagtaagtttaacgtcggtgcgatttatcgcgttaccgattgggccgacgttaaccttagctatgaacgtggcaacacctttatgtttggcgttacgttgcgcaccaactttaacgatctgcgcccgtcttacaacgataacgcccgcccgcaatatcaaccgcagccgcaggatgccattttgcagcatagcgtggtggcgaatcagttaacgctgttgaaatacaatgccggacttgccgatccacagatccaggcgaaaggcgatacgctgtatgttaccggcgagcaggtgaaatatcgtgatagccgcgaagggatcatccgtgcgaatcggatcgtgatgaacgatctgccggatgggatcaaaacgatccgcattacggaaaatcgccttaacatgccgcaggtgacgacggaaaccgatgtcgccagcctgaaaaatcatctcgccggagagccgttgggccacgaaacgacgctggcgcaaaaacgcgtcgagccagtggttccgcagtccaccgagcagggctggtatatcgacaaaagtcgctttgatttccatatcgatccggtgctgaaccagagcgtcggtggcccggaaaacttttacatgtatcagctgggcgtgatgggaacggcagatttgtggctgacggaccatctgctgaccaccggcagcctgtttgcaaatcttgccaacaactacgacaagtttaactacactaatcctccgcaggacagccacttaccgcgcgtgcgtacccatgtgcgcgagtatgtgcagaacgatgtctatgtgaataacctgcaagccaactacttccagcatctgggcaacggcttctacggtcaggtctacggtggttatctcgaaaccatgtttggcggtgcgggggcagaagtgttgtatcgcccgctggacagcaactgggcgtttggtctggatgccaactacgttaaacagcgcgactggcgtagtgcaaaagatatgatgaaattcaccgactacagcgtgaaaaccggacatctgaccgcctactggacgccatctttcgctcaggatgtgttagttaaagccagcgtcgggcagtatctggcaggggataaaggcggcacgctggagatcgccaaacgctttgatagcggcgtggtggtgggtggctatgccacgatcactaatgttagcaaagaggagtacggcgaaggggacttcaccaaaggcgtgtatgtcagcgtaccgttggatctcttcagctctggcccgacacgcagccgtgcggcgattggctggacgccgctgacgcgtgacggtggtcagcaacttgggcgtaagttccagttgtatgacatgaccagcgaccgtagcgtcaatttccgctaagtcatgggaaaggtgccagttttcgcactcactggcaccttcattcttaatggcctgtcgagccatcaggaacgcagttcactcccggtttgcgatctggtgtgtaaaggcgaaaacattctgtcttcctgtccgtcgatatcggttgcaggtctggttgcctgagcgactgggccatcattgggctggagacattgctttgcggtaggtcggctttatcagcagtaccgagcggaccagcataagcaggaagaacagagactgataacatcaaagcagcaaaataaggcttcatttttaccacctttatcaggttacgtttcatttgttccagaggaacattgtcgatttttcgcgcattgctggtggctgggaatcacctgaatgggtgatttttgaattaccggctttggtgcggtttgtcttgccggatgcgccgccaggcgcggcttatccggcctacgggtaggtatatccggctttggtggaggcgcgctccaaatccaggttgaacaaaacatacacaaaaaatatagatctccgtcacatttttgcgttatacaggaagctcgccactgtgaaggaggtactgctatgacgagtctctctcgtccgcgcgtggagtttatctccaccattttgcagaccgtactcaatcttggcctgctgtgcctcggcctgattttggttgtcttcctcggcaaagaaacggtgcatctggctgatgtgctgttcgcgccagaacaaaccagcaaatatgagctggtagaaggactggtggtttactttctctatttcgaatttatcgcgctgattgtgaagtactttcagtccggttttcacttcccgctacgttactttgtctatattgggatcaccgccattgtgcgcttgatcatcgtcgatcataaaagcccactggatgtgttgatctacagcgctgcgatcctgttactggtgatcaccctgtggctgtgtaatagcaaacggctgaagcgggagtaaaaagtcagcacgccgaaatggcgcggcgtgctggacaggaagattacagcgtagcagtttgttgtgttttcttcgtttccggttcccagagcgcttccagctcctcaagggttttacctttggtttccgggacaaatttccacataaacagtgctgccagaacgcccatacaaccgtaaatccagtaggagaaaccgttgtggaaatgggccaccagccaggagtttttgtccatcatcgggaaggtccaggagacgaagtagttcgccagccactgggccgccaccgcgattgccagcgctttaccacgaatagcattcgggaagatttcgctcagcagtacccagcataccggaccccaggacatggcaaaggcggcaacatagaacagcatgctcagtagcgccacaatacccggtgcctgagtgtaaaacgcggtaccgaggctaaacataccgattgccattccgagtgcgccgataatttgcagtggcttacgaccaaatttatccaccgtcataattgccagaacggtgaaggtgaggttgataactccgacaataatggtctgcaacagcgcgatatccgtgctggcccccagcgttttgaacacttccggcgcgtagtacagcaccacattgatgccgacaaattgctggaagatggagagcattacgccgattacaatcacgcccacgccaaacatcagcagacgaccaccggttttgcggccatgatccagggagtgtttaatttcctgtactgcctgagttgcaagcgtgttgcccataattttgcgcaggataccttccgcctgttcttgcttgccgcggctcatcagccagcgaggactttctggcacggtatacagcagcattaagaacagcagtgcagggatacattcgctggcaaacatataacgccagccgtcagtattcagccagctggcatcaccggaacgggcaataaaatagtttacgcagtaaactaaaagttgcccgaaaataatcgcaaactggttaaaagagaccagtttcccgcgaatatgagctggagccagttccgcaatatacattgggctgagcatactggctaaaccaacgccaataccgccaataatgcgataaataacaaattccgggacataacctgccagataaacaggcacagtgttgtccgggtttatagaggtaaaaccaagttctggccaggcagaacctacaccagaaataaaaaacaggacagcagcaatcttaagactatcacgacgaccgaagcggttactgcaataaccaccgagggcaccgccgatgatgcaaccaatcagagcgctggccacgcaaaaccctaacagggagttggcagcggattcacttaagttttgtggagcaacaaagacggtattgagactctcaacagtaccggaaataacggcggtgtcgtagccaaataataaaccacctaatgtagcgactaaggtaatgctaaatatataactggaattatactgggtattcattcagacctgccttagaccattctgatcttttatcagtgcattgatgttggaattgtcaggcagttaaggcaattatcattttttacaatgcgtttacgtaatgtcttttctgtgatcttaattgtgataattatccaaaattgataaaaacaatactattgccgtgactcagagcacgaaagagaattatcgtaagtgggaaaacaaataacgtaaaaataataagctctatgatggaaatattaaccggcgaacgattcagattgcagacgaaagaaaaaaaggcgctccgtggagcgccgaataacagtcacaagttgggataacgtaagttgagggtgcagcggcataacattggcagaacaacatctttaacctttcacaccacctgccgtcaggccgttgaccagccagcgttgagccagcaagaagacgatggtgatcggtaatgcagacatcacggcagcggcggcaaagtcaccccacaggtagttttgcgggttgaggtattgctgcatccccacggccagggtgtagctgtttacgtcacgcagtaacaggctcgcgaccggaacttcagtaatggcagcgataaagctcaggatgaataccaccgccagaatcggtacactcagcggcaacaggacaaggcggaaggcctgccacggtgtcgcaccatccagcgcagcagcttcttccaggctactgtcgatggtttcgaaatagcctttgatggtccagacatgcagcgcaatcccacccagatacgcgaaaattacgccgccgtgagtattcaggccaatgaatggaatgtactcacccagacgatcaaacaacgcatacaacgcgaccagactaagtactgccgggaacatctggaaaatcagcattcctttcagcagcgtcgctttgcctggaaagcgcatacgggcgaaagcgtaggcgcaggtggtggagagcgccacaatgccaatcgcggaaatcccggcgacctttacgctgttccacagccacagcagtaccgggaatggcggtggcgtaatgcgaccatcagcctgttcaacgctaaaacctaacgccagtttccagtgatcccaggagatttgctccgggatcaggctgccggtcgcaaagtttccctgacgcaggctgatagcgacgaccatcagcagcgggaacataatcgctgcgataaaaagtagcagtagcaggtgagtaataaataaacgagctttttggcttttcggttggaccattgccatttttgttatctcccttaatcaaacttcattcgcgtggctttcaggttcactatcgccagcgcacccaccagcaggaagatcagcgtggcaattgctgccgccagaccgaagtcctgacccccgccgccttcaaaagcgatgcggtaggtgtagttaacaagcaggtcggtataaccggctggcgtggtcgtgccaagacgatccgggccgccgttggttaacagttgaatcagcacgaagttgttaaagttaaaggcgaagctggcgatcatcagcggcgtcagcggtttaatcagcagcggcagcgtaatcttaaagaagttctggaacggacctgcgccatccattgcactggcttcatacaaatcgtccggaatcgctttcagcaagcccatgcagaggatcatcatgtacggataacccagccaggtattgacgataattagcatcgtgcgggcggtggtcggatcgctgaaccaggcgggcttcacgccaaacagcgcgctcaacatcatgttgatttcaccgaagctctggttaaacaaccctttgaaaatcaagatactaatgaagcttggcaccgcgtagggcagaatcagcaggacgcgatagaccgctttgccgcgcaacgcttcccactgcaccagacacgccagaaccatgccgaccgccaccgttaaaaagacagtgatcaggctgaacaccacggtccagacgaaaatggcgaggaacggtttctgaatgccttcgtcggtaaagacgcgggtaaagtttttccagccggtggtcacggtgtaaccggggcttagcttttcatcaccccagttgccgtcggcggtaatggactggtaaaagccaatttggttattcggacgatatttcacgccgctctgattattcgtcaacgtgccgtcaccgtcgagtgtgtagagcggctgcgtgccagaaaactggcgcagggagctcatcatcactttgttgccatccggcagaatggcggtaatgtcactcagcgcctgacgattctgggtaatcacgcgcagattcgcgcgttcgccttcgggctgggcggtcgtttctttcagttgcagtttttgctcgccgccaaatttaaaagcgtcggagaggtaatttttgccggtttcgccgtcgctgagcgccagttgccactcatcgcccgccgggtaaagaccaaagttataggttttgcctgcttgccaggagcgatctaacaacacttcctgcgcacgttcaaaagtcagctggttagtgctgctgtagttggtgaaggcaatggcgatggtgcagaccagagggaagaggacgaataatcccattccagccattcccgggtaaacatagcgccaggcgtaggctttacgattggcgaaaatatacagccccgcactactcaatatcagcgtggtaatggcgaacaggtattccccttgtgcgtacattaaaacaacaaggtaacccaccagcaggccgagcagacctagcacactccatttcagcgcgtcgctttgccaccaatgtttctttttaatgacatccatggggttcttcctcattccaggacggataaggctttcacgccttatccgacaacaactgcctgatgcgacgctgacgcgtcttatcaggcctacatacgtttcggttttgtaggccggacaaggcgttcacgccgcatccggcatttcacagcattacttggtgatacgagtctgcgcgtctttcagggcttcatcgacagtctgacgaccgctggcggcgttgatcaccgcagtacgcacggcataccagaaagcggacatctgcgggatgttcggcatgatttcacctttctgggcgttttccatggtggcggcaatacgtggatctttcgccaactcttcctcgtaagacttcagcgctacggcacccagcggtttgtctttattaaccgcttccagaccttcatcagtcagcagatagttttcgaggaactctttcgccagctctttgttcggactggcggcgttaatacctgcgctcagcacgccaacgaacggtttggatggttgacccttgaaggtcggcagtaccgttacaccataattcactttgctggtgtcgatgttggaccatgcccacgggccgttgatggtcatcgctgtttcgcctttattaaaggcagcttctgcgatggagtaatcggtgtctgcattcatgtgtttgtttttaatcaggtcaaccaggaaggtcagacccgctttcgcgccagcgttatccacgcccacgtctttaatgtcgtacttgccgttttcatacttgaacgcataacccccgtcagcagcaatcagcggccaggtgaagtacggttcttgcaggttgaacatcagcgcgctcttacctttcgctttcagttctttatccagcgccgggatctcttcccaggtttttggcgggttcggcagcagatctttgttataaatcaggcttaacgcttcaacagcgatcgggtaagcaatcagcttgccgttgtaacgtacggcatcccaggtaaacggatacagcttgtcctggaacgctttgtccggggtgatttcagccaacaggccagattgagcgtagccaccaaagcggtcgtgtgcccagaagataatgtcagggccatcgccagttgccgcaacctgtgggaatttctcttccagtttatccggatgctcaacggtgactttaattccggtatctttctcgaatttcttaccgacttcagcgagaccgttatagcctttatcgccgttaatccagattaccagtttaccttcttcgattttggcgagagcgctggcggaaaacatcatcgtcgttaatgcggataatgcgaggatgcgtgcacctgtttttattttcataatctatggtccttgttggtgaagtgctcgtgaaaacacctaaacggactctagtttctttatacggcaacctctttccatcctccttgcccctacgccccaccgtcgctttgtgtgatctctgttacagaattggcggtaatgtggagatgcgcacataaaatcgccacgatttttgcaagcaacatcacgaaattccttacatgacctcggtttagttcacagaagccgtgttctcatcctcccgcttcctcccccataaaaaagccagggggtggaggatttaagccatctcctgatgacgcatagtcagcccatcatgaatgttgctgtcgatgacaggttgttacaaagggagaagggcatggcgagcgtacagctgcaaaatgtaacgaaagcctggggcgaggtcgtggtaagcaaagatatcaatctcgatatccatgaaggtgaattcgtggtgtttgtcggaccgtctggctgcggtaaaagcactttactgcgcatgattgccgggcttgagacgatcaccagcggcgacctgttcatcggtgagaaacggatgaatgacactccgccagcagaacgcggcgttggtatggtgtttcagtcttacgcgctctatccccacctgagtgtagcagaaaacatgagttttggcctgaaactggctggcgcaaaaaaagaggtgattaaccaacgcgttaaccaggtggcggaagtgctacaactggcgcatttgctggatcgcaaaccgaaagcgctctccggtggtcagcgtcagcgtgtggcgattggccgtacgctggtggccgagccaagcgtatttttgctcgatgaaccgctctccaacctcgatgctgcactgcgtgtgcaaatgcgtatcgaaatctcccgtctgcataaacgcctgggccgcacaatgatttacgtcacccacgatcaggtcgaagcgatgacgctggccgacaaaatcgtggtgctggacgccggtcgcgtggcgcaggttgggaaaccgctggagctgtaccactatccggcagaccgttttgtcgccggatttatcggtagcccaaagatgaacttcctgccggtaaaagtgaccgccaccgcaatcgatcaagtgcaggtggagctgccgatgccaaatcgtcagcaagtctggctgccagttgaaagccgtgatgtccaggttggagccaatatgagcctgggtattcgcccggaacatctactgccgagtgatatcgctgacgtcatccttgagggtgaagttcaggtcgtcgagcaactcggcaacgaaactcaaatccatatccagatcccttccattcgtcaaaacctggtgtaccgccagaacgacgtggtgttggtagaagaaggtgccacattcgctatcggcctgccgccagagcgttgccatctgttccgtgaggatggcactgcatgtcgtcgactgcataaggagccgggcgtttaagcaccccacaaaacacacaaagcctgtcacaggtgatgtgaaaaaagaaaagcaatgactcaggagatagaatgatgattactctgcgcaaacttcctctggcggttgccgtcgcagcgggcgtaatgtctgctcaggcaatggctgttgatttccacggctatgcacgttccggtattggttggacaggtagcggcggtgaacaacagtgtttccagactaccggtgctcaaagtaaataccgtcttggcaacgaatgtgaaacttatgctgaattaaaattgggtcaggaagtgtggaaagagggcgataagagcttctatttcgacactaacgtggcctattccgtcgcacaacagaatgactgggaagctaccgatccggccttccgtgaagcaaacgtgcagggtaaaaacctgatcgaatggctgccaggctccaccatctgggcaggtaagcgcttctaccaacgtcatgacgttcatatgatcgacttctactactgggatatttctggtcctggtgccggtctggaaaacatcgatgttggcttcggtaaactctctctggcagcaacccgctcctctgaagctggtggttcttcctctttcgccagcaacaatatttatgactataccaacgaaaccgcgaacgacgttttcgatgtgcgtttagcgcagatggaaatcaacccgggcggcacattagaactgggtgtcgactacggtcgtgccaacttgcgtgataactatcgtctggttgatggcgcaagcaaagacggctggttattcactgctgaacatactcagagtgtcctgaagggctttaacaagtttgttgttcagtacgctactgacagcatgaccagccagggtaaagggctgagccagggttctggcgttgcatttgataacgaaaaatttgcctacaatatcaacaacaacggtcacatgctgcgtatcctcgaccacggtgcgatctccatgggcgacaactgggacatgatgtacgtgggtatgtaccaggatatcaactgggataacgacaacggcaccaagtggtggaccgtcggtattcgcccgatgtacaagtggacgccaatcatgagcaccgtgatggaaatcggctacgacaacgtcgaatcccagcgcaccggcgacaagaacaatcagtacaaaattaccctcgcacaacaatggcaggctggcgacagcatctggagtcgcccggctattcgtgtcttcgcaacctacgccaagtgggatgagaaatggggttacgactacaccggtaacgctgataacaacgcgaacttcggcaaagccgttcctgctgatttcaacggcggcagcttcggtcgtggcgacagcgacgagtggaccttcggtgcccagatggaaatctggtggtaatagcaaaacctgggccggataaggcgtttacgccgcattcggcaaccaacgcctgatgcgacgcttgcgcgtcttatcaggcctacaacggctgtcaaatgtaggccggataaggcgtttacgccgcatccggcataaaaacaggttgtcattatctgaaaggggcgaaagcccctctgattatcgggtttagcgcgctattgcctggctaccgctgagctccagattttgaggtgaaaacaatgaaaatgaataaaagtctcatcgtcctctgtttaagtgcagggttactggcaagcgcgcctggaattagccttgccgatgttaactacgtaccgcaaaacaccagcgacgcgccagccattccatctgctgcgctgcaacaactcacctggacaccggtcgatcaatctaaaacccagaccacccaactggcgaccggcggccaacaactgaacgttcccggcatcagtggtccggttgctgcgtacagcgtcccggcaaacattggcgaactgaccctgacgctgaccagcgaagtgaacaaacaaaccagcgtttttgcgccgaacgtgctgattcttgatcagaacatgaccccaagtgccttcttccccagcagttatttcacctaccaggaaccaggcgtgatgagtgcagatcggctggaaggcgttatgcgcctgacaccggcgttggggcagcaaaaactttatgttctggtctttaccacggaaaaagatctccagcagacgacccaactgctcgacccggctaaagcctatgccaagggcgtcggtaacagcatcccggatatccccgatccggttgctcgtcataccaccgatggcttactgaaactgaaagtgaaaacgaactccagctccagcgtgttggtaggacctttatttggttcttccgctccagctccggttacggtaggtaacacggcggcaccagctgtggctgcacccgctccggcaccggtgaagaaaagcgagccgatgctcaacgacacggaaagttattttaataccgcgatcaaaaacgctgtcgcgaaaggtgatgttgataaggcgttaaaactgcttgatgaagctgaacgcctgggaagcacatctgcccgttccacctttatcagcagtgtaaaaggcaaggggtaattacgccccacagtgctgattttgcaacaactggtgcgtctcctggcgcacctttttttatgcttccttcctgggatatgagcgattttttatagtaactcacttcttcttcactaagaatatccattatctcaatgccttatcagagattcttttcctttcgccggtagtgtctggacattcaggctacttttccaggttattttatttctgttatgcagaggttttatgataagtcatatcctaaattctggcggcaataactctttgatgaaacatgatgtggtgcaaggaaataatatagtagatcttgatttactacgtaatttaaatggggtgccaggtttaaacagagataactttatttatatcagcaatattttttcaaatataaaacaacggaacgaaaaaatcatgcaataaatatgtttcgtgaagtctcaatcagtaatgatactataagtgtaaaattctacagaaatgaaaaaaattgaatgcgcttgcaattttctgatggataaagatgcgcaggggtatatcgacctgtctgatttggatttaacaagttgtcattttaaaggtgacgttataagcaaggtgtcttttttaagtagtaatctacaacatgtaacattcgaatgtaaagaaattggggattgcaattttactactgcaatagttgataatgtcatatttagatgtcgacgtttacacaatgtgatttttatcaaagcgagtggtgaatgtgtcgatttcagcaaaaatattcttgatacagttgacttcagccagagtcaacttggtcatagtaattttcgcgaatgtcagattagaaatagtaacttcgataattgttatctttacgctagccacttcaccagagcagagtttctgtctgccaaagaaataagttttattaaaagcaatttgacagctgttatgtttgattatgtgcgaatgagcacagggaattttaaagattgcattacagaacaattggaattaactattgattatagtgatatattttggaatgaagatctcgatggttatatcaataacattataaaaatgattgatacattgccagataatgcaatgatattgaaatccgttctggccgtaaaactggtgatgcaattaaaaatacttaatattgttaataaaaactttattgagaatatgaagaaaatatttagccattgtccttatataaaagatcccattatacgcagttatatccattctgatgaagataacaagttcgatgattttatgcgtcaacatcgattcagtgaggtgaatttcgatacccaacagatgatcgattttattaacagatttaatacgaataaatggctaattgataaaaataacaatttttttatccaacttatcgatcaggccttacgaagtacggatgatatgatcaaagcaaatgtttggcatctttataaagagtggattcgtagtgatgatgttagtcctatatttatagaaactgaagataatttaagaacctttaacacgaatgaattaacacgaaacgataatatctttatcctgttctccagtgtcgatgatgggccagttatggtggtaagctcccagcgcttacatgatatgttgaatcctacaaaagataccaattggaattccacgtatatctacaaatccagacatgagatgttgcctgttaatcttactcaggaaacacttttcagctccaaatctcatggtaaatatgcgcttttccccatttttactgcgagttggcgagctcatcgtataatgaataagggtgtttaagtaaaggaaaacatcaccgttcctggcatcctggacggtgatgcccctacggttgccctcgccagcacgggcatcggtaaagcgtaaggttcaacatcgttttaccacttcatgcgattgttgcgtttttgttgcgtattagatcacttaatttgctttacatctcccgtaaacacttttctgcgatacaatgcctttacgttatgtaacggagagttcggcatgagtcaccccgcgttaacgcaactgcgtgcgctgcgctattgtaaagagatccctgccctggatccgcaactgctcgactggctgttgctggaggattccatgacaaaacgttttgaacagcagggaaaaacggtaagcgtgacgatgatccgcgaagggtttgtcgagcagaatgaaatccccgaagaactgccgctgctgccgaaagagtctcgttactggttacgtgaaattttgttatgtgccgatggtgaaccgtggcttgccggtcgtaccgtcgttcctgtgagtacgttaagcgggccggagctggcgttacaaaaattgggtaaaacgccgttaggacgctatctgttcacaagtagcacattaacccgggactttattgagataggccgtgatgccgggctgtgggggcgacgttcccgcctgcgattaagcggtaaaccgctgttgctaacagaactgtttttaccggcgagtccgttgtactaagaggaaaaaaatatggagtggagtctgacgcagaataagctgctggcgtttcatcgcttaatgcgtacggataagccaattggcgcgttactgctgctctggccaacattatgggcgttgtgggtggcgacaccgggcgttccccagctctggatcctggcggtgtttgtcgcgggtgtctggctgatgcgcgctgccggatgtgtggtgaatgattatgctgaccgcaagtttgatggtcatgttaagcgcacggcgaaccgaccacttcccagcggcgcggtaacagagaaagaggcgcgcgcgctgtttgtcgtgctggtactgattagctttttactggtgctgacgctgaatacgatgaccattctgttgagcattgccgcgctagcgctggcgtgggtgtacccgtttatgaagcggtatacccatctaccgcaagtggtgctgggcgcggcgtttggctggagcattccaatggcttttgccgctgtgagtgagagcgtgccattgagttgctggttaatgttcctcgccaatattctctgggcggtggcttacgacacgcagtatgcgatggttgaccgcgatgatgatgtgaagattggcattaaatccacggcaatcctgttcggccaatacgataaattgattattggtattttgcagattggcgtactggcactgatggcgatcatcggtgagttaaatggcttaggctggggatattactggagtattctggtggctggcgcgctgtttgtttatcaacaaaaactgattgccaaccgcgagcgtgaagcctgctttaaagcatttatgaataataactatgttggtctggtactatttttagggctggcaatgagttactggcatttctgatgatgtaaaaaagccggatgatcatccggctttcttctgggttgcctgatgcgcggcgcttctcaggcctacacaacacatcgcaatttattgaatttgcagattatggaaggccggataaggcgttttcgccgcatccggcaattctctctgattacccttcgccctgcgtcgcactctcaatcgtcaaacgcacgtcacttgtaatcaactccgccagcaactgataaaccttcatcgtttctgccggttcggcatcgccgctatcgctgatatacccttcatcacgcagtgtcagcaccagagaactgaacaccgccttgtcgaagaactccggcgcgttgatgccgtgcagcacggagagacgttgcgcgacggtgcggctctctttctccagcgtaccgcggttgatgctcgggttggcactcaacaaccagaaggtgatggcataacgttgcagcgtttcgcgcgcgcctgcggccagcagctgtagcgtgcgagaatgcgccgggttgatatgcaactcatcatcttgcagggtaatcagcccctgacgttgcatctcatttgccagcgcatcaataacgtccggcaactcgtcgcgatcccagcgcaggaacagctccgctttcagcattgggtaaagcacattgacgtgctccatcaatacgtcgcgggagatgtggcgatgctgggtgacgattgccgccatcaggctaggcagcaccaacatatgcgcaatgttgttgcgatagtaggtcatcagcaccgcttgctcgcgcggcagaatgatgatgtcgccgattgtgtctttctcgacttcaaacttgttcatttgcagcgcgtgatcgataagctcgctggcgctggcactaggaacggtagagtccgtggagtagggcacgttgcgcatcagatccaggtagcagttgagttgctcggttaactgctcgcgggtgagactgcgctgacgacttgccagtagcgcagtacagcacaggttcatggcgtttgccgcgcctgcgttgttaatgcgtaccatcagatcggcagcaatattattgaccgtcggcgttaaccatgccggacgcaccgcttcgatgggatcgatagattcacgccagtcaggtacatgctggttaaggtaggtcatcaacggcattggttcaccgaagttgacgtaaccctgaccgagattacgcagcttgcttaaaccgcgcagcatctgcggcaggctctctttctctttcgtcgcgccgcgcagttctttggcgtaagtacccacttccatgacgtgctcataaccgatatagatcggaatcagcgtaatcggacgcgtgccgccacgcagcatcgcctgaatggtcatgctcagcgtaccagttttcggatccagcaaacgccccgtacgggaacgaccgccttccacgaagtactcgacggaataaccacggctgaacagttcgccgagatactcccggaaaacggtggaataaagtttattgcctttaaacgtacggcgaataaagaacgcccccagacggcggaaaatcggcccggcaggccagaaattcaggttgatcccggcggcgatatgcggcggcaccagcccctggtgatacagcacgtaagaaagcagcaggtagtccatgtgactgcggtggcaaggcacatataccagctcatgaccgtcgtgggccagctggcgaacgcgctcagcgttatggacgttgatgccctggtaaagtcggttccaggtgaagcccagaatacggtcagtcaggcgaatcatctcgtaagagaaattcgccgcaatctcttccatcagtgcaatcgcgttctgctgcgctttttcatgggagatttttttgctgcgcgcttcatcttctaccgctttggcaatggcgcgggaggcgagcagcttattaaacagatcctgacgagcaggcaaacgtgggcctacggcagccagacgttgacgggcaaagtgcatacgcgccacgcgcgccagtttctgagcgatagttttatccgtgccgtgttcatccgccatacggcgcaggctaacactcgggctgaaacgcacaaaactgtcgcgaccgagccacagtacagcgaaaaatttctgtacgccgttaagcatacgcagcggcgggttcacttcgcctttttcacgccccggcgcgcgaccaaacatcacgctcactggcaccatctgcacatccagatttgggttgctacggtgcaaatcgagatagtcgtggaacagcttaatagactcttctttcggcgtgtaataggtgaacacacgcggcccgccgtgaatgaacacatagcgcggcagtagcgtgccgtcgatttccagcggctctaacgggtcaggcaagtcatgtgccagacactgggcgcgcaacgtcagcaaatctgctttgctgttgtacggtaaaacgtacataattggacgagaggtatccagccccagttccggggcaggatctgccggaatagacttgctttttaccaggatgcttaatggtaaattcagtaatttgtagtaaattcgtggccagccggacataaacgatgtaaagcctctggttaataatgcaaatgcgcggcaaggatagcagaaagtcatgggaaattctgtggtatccgctcatgtttcgcgcggcgctacgcaaacccgaatcatcggatttaacggtacactgatattgacgctcataatgtaaaaaggttctttcaatggccaataataccactggattcacccgaattatcaaagctgctggctattcctggaaaggtttacgcgctgcatggatcaacgaagcggcattccgtcaggaaggcgtagcggtattgttggcggtggtcatcgcctgctggctggatgtggacgcgattacccgcgtgctgcttatcagctccgtgatgctggtgatgattgtggaaatcctcaatagcgccatcgaagcagtggttgaccgaattggctctgaataccatgagctttccggacgcgcaaaagatatgggatccgctgcggtgctgattgccattatcgtcgccgtgattacctggtgcattctgttatggagccattttggataacccttccagaattcgataaatctctggtttattgtgcagtttatggttccaaaatcgccttttgctgtatatactcacagcataactgtatatacacccagggggcggaatgaaagcgttaacggccaggcaacaagaggtgtttgatctcatccgtgatcacatcagccagacaggtatgccgccgacgcgtgcggaaatcgcgcagcgtttggggttccgttccccaaacgcggctgaagaacatctgaaggcgctggcacgcaaaggcgttattgaaattgtttccggcgcaagtcgcgggattcgtctgttgcaggaagaggaagaagggttgccgctggtaggtcgtgtggctgccggtgaaccacttctggcgcaacagcatattgaaggtcattatcaggtcgatccttccttattcaagccgaatgctgatttcctgctgcgcgtcagcgggatgagcatgaaagatatcggcattatggatggtgacttgctggcagtgcataaaactcaggatgtacgtaacggtcaggtcgttgtcgcacgtattgatgacgaagttaccgttaagcgcctgaaaaaacagggcaataaagtcgaactgttgccagaaaatagcgagtttaaaccaattgtcgttgaccttcgtcagcagagcttcaccattgaagggctggcggttggggttattcgcaacggcgactggctgtaacatatctctgagaccgcgatgccgcctggcgtcgcggtttgttttagttctctcttcatcaggcttgtctgcatggcattcctcactagttctgataaagcactctggcatctcgccttacccatgattttctccaatatcaccgttccgttgctgggactggtcgatacggcggtaattggtcatcttgatagcccggtttatttgggcggcgtggcggttggtgcaacggcgaccagctttctctttatgctgttgctgtttttacgcatgagcaccaccgggctgactgcgcaggcttatggtgccaaaaatcctcaggcattagcccgtacgctggtgcaaccgttgctgttggcgttgggggctggggcgttaattgcgctgctgcgtacgccgattatcgatctggcgctgcatattgttggcggtagtgaggcagtcctggaacaggcgcggcgctttcttgaaatccgctggttaagcgcaccggcgagcctggcgaatctggtattactcggttggttactcggcgtgcaatatgcccgtgcgccagtaattttgttagtggtcggcaatatcctcaacattgtgctggatgtctggctggtgatggggctgcatatgaacgtgcagggcgcggcgctggcgacggttattgcggaatatgcaacattgctgattggtctgctaatggtgcgtaaaatcctcaaactacgcggaatttccggcgaaatgctgaaaactgcctggcgaggaaacttccgtcgcttgctggcgcttaaccgcgatatcatgctgcgtagcctgttgttgcaactctgtttcggcgcgatcaccgtacttggcgcgcgactggggagtgacattatcgctgttaacgcggttctgatgacgctactcacctttaccgcctatgcgctggatggttttgcctacgcggttgaagcgcactccggtcaggcatacggtgcgcgcgacggtagccagttgctggatgtctggcgggcagcgtgccgccagagcgggatcgtagcgttactgtttagcgtggtttatttgctggctggggaacacatcattgcgttactgacgagcttaacccagattcagcagctggctgaccgctatcttatctggcaggtgattttgccggtggttggcgtctggtgttatctgctggacggcatgtttataggcgcaacgcgtgccaccgaaatgcgtaacagtatggcggtggccgccgcaggttttgcgctgacgctccttacgctgccgtggctgggtaatcatgctttgtggctggcattaaccgtctttctggcgttgcgcgggctttctctggcggctatctggcggcgtcactggcgcaatggtacctggtttgccgcaacgtgacggttaaaaattctgaataaataatcctaagccaaattgctgactacacttaatctcacgttcagaagaaaagtgaacgtactctcattcacaacctaacgatgaggtcttgattatgaataaagatgaagccggcggtaactggaaacagtttaaaggtaaagtgaaagagcaatggggcaaactgaccgatgatgatatgacgatcattgaaggtaaacgtgatcaactggtcggtaaaatccaggaacgttatggttatcagaaagatcaggcagaaaaagaggtcgtggattgggaaacccgcaatgaatatcgctggtaattaatccctcctgcccgacgtgtacaaggatgtacgccctcttaacgcggtttctttttcacctgcacagagtgatcatgctggcactgttcaggatgacgacacgcttccacttctacacatgccgcacagagcccatgtgcttcaatcacattatgccgcagggcaaaccccatttttgccgccagcgtatgcataatgtcttccacgccttctgcacactcttctttcactgcgccgcagcgatcgcaaataaacatggcactcgtatgggtgggctgatcgaacagatgacagagcacataactgttggtggattccaccttatgcacaaaaccttgctcaagcagaaaatccagcgcgcgataaaccgttggcggcttggcttgcggttcagcttcgcgcagtaaatcaagcagatcataagcgctgatagcgccatcctgcagactcatcaggcgcaacacttccaggcgctgtggggtcaggcgcacattacgctgcgcgcagattttttcagcctgcgctaataactcctgcgttgtggtcttttccatcgggcacctcaaagtgggggttaagaatgtccttactttaccatgttccaggaaaaacaccgagaacccttattgttgccgtaatgttgattttctgctttgtaggtaaggtgttatgttgccttgtcgtaccattatcaacacgataataattaataattcatttttaaataaattgcttcaagttaactcgctatttatttaactgggtttaaacgcatacctgtagttcagaaattatgagcgatttttgatagtgaccagatggcaaaagaattataaggaggacacggtacgacaaaaaaggtagatgaatcatgttgaagataatacccggtgcaactggatactttaataaaacactcaatagtaatcaattcgataatgaagatgcaatcaaagataaattagataatagaggtagtatcaaaggtaaattaaataatatatatggtaaatctattgattatgcagcgctgcgtcatcgggatataattattgcaaaaatagatttgtttattcaacgaatcacgcataatttatggcatgcacgtaaaaaaatgtgtttttaattgtgcaaataaatgatctcaaaatgtgggtcaataagtatattgacgattgcactgatgaggatttaaacgatcgtgactttattgcaagtgttgttgaccgggctatttttcatttcgcgattaatagtatatgtaatcctggggataataaagatgcaatgcccattgaacaatgtacttttgatgtagaaactaagaatgaccttccctccacggttcagctattttatgaggaatctaaggataatgaacctttagcgaatatacattttcaagcaataggttctggttttttaacgtttgttaatgcctgccaggaacatgatgacaacagcttaaaattatttgctagcctgttaattagtcttagttattctagtgcctacgcagatttaagtgaaacagtgtatattaatgaaaataatgagagctacctgaaagctcagtttgaaaaattatctcaacgtgatatgaagaagtacctgggagagatgaagcgtctggctgatgggggagaaatgaattttgatggctatctggataagatgagtcatctggtgaatgaaggaacgctcgatcctgatattttaagcaaaatgcgagatgctgcaccacaattaattagcttcgcgaagagctttgacccaaccagtaaggaagagattaaaatacttacagacacttctaaattaatttatgatttgttcggggttaaaagcgagaaataatatgtgaagttcttcgatagtatggaaggcattatataaaaggacccaatatttattgggttcttttttctctatcaatactattagcagggagatatatcaccagagtttaatgtgtgattttttatttatcgtcgaacctggattgtttatcattggccttaacaaagttaacggctaataagattatttccatcacttcgtgagagcttcatgccttgagaggatctcaattttcttttgcaatgagacaggcgcttcctgttgttatggtatagtaccccgctattgagcctcctgaatagtgatgctgaataacataaccccatgatatatcgataaaataatctctacatttgaaaatgcacggtaattctgaaatgcaaaaaatcaaccaaaccagcgcaatgcctgaaaaaactgacgttcactggagtggtcggtttagcgttgcaccaatgctcgactggacggacagacattgccgctatttcttgcgtctgctttcccgcaatacgttgctgtataccgaaatggtgaccacaggggcgattattcacggtaaaggtgattatctggcgtacagtgaagaagaacatccggtagcgttgcaactgggcggtagcgatccggcggcgctggcgcagtgtgcaaagctggcagaagcgcgcggatatgatgagatcaacctgaatgtcggctgcccgtctgaccgggtgcagaacggcatgtttggtgcgtgtctgatgggtaatgcgcagctggttgccgactgcgtgaaagcgatgcgcgatgtggtgagcattccggtgacggtgaaaacgcgtattggcatcgacgaccaggacagctatgaatttctctgcgatttcatcaataccgtttccggcaaaggcgagtgtgagatgttcatcatccacgcacgtaaagcctggcttagcgggttaagcccgaaagaaaaccgtgaaatcccgccgctcgattatccgcgtgtgtatcaactgaagcgtgactttccgcatctgacaatgagcattaacggtggtatcaagagcctggaagaggccaaagcacacctgcaacatatggatggcgtgatggtcgggcgcgaggcgtatcagaatccgggtattctggcggcggtagaccgggagatctttggttccagcgataccgatgccgatccggtggcggtagtgcgcgccatgtatccgtacattgagcgtgaactcagccaggggacgtatctcggccatattacccggcatatgttgggcttgttccagggtattcctggcgcgcggcagtggcggcgttatttaagtgaaaatgcccataaagcgggtgcagacattaatgtgctggaacacgcgctcaaactggtggcggataagcgttaacttttcaccaaaaagtagtcaaattcaccacgccctgcgcaccgtcgcggggcgttttgctgttaaatcaatagattatttttggcatgattcttgtaatgccagcaagagatttcatatttgggagagcatcatgctggaactactttttgtgattggcttttttgtcatgctgatggtcaccggcgttagcttgctgggcattatcgccgcgctggttgtggcgacggccattatgttcctcggcggtatgctggcattgatgattaagttgctgccgtggttactactggcgattgcggtggtgtgggttattaaggcgattaaagcaccaaaagtgccgaaatatcagcgttatgaccgctggcgttactaagggattgtgcggatgatcacaacctaaggttttatccttagaacaaaataggaattaataatcaaatctgtcactattgcgcctctaacagattcatcgtgctgtaccctacatacagccgaactataaaaagaaagggcttcccaggtggaagccctatttcttttatggaatcagcaggctggaaccttgcgtcgcccggctttccagaatctcatgcgcacgctgcgcatccttcagcggatatttctgctgctcggcgacatcgaccttaatcacaccgctggcaatcaaagagaacagttcattactggcctcggttaattcctcccgcgtggtgatatagccttgcagggaagggcgtgtcacatacaagctgcctttttgattgagaatgcctaagttcacaccggtaaccgcaccactactgttgccaaaactgaccattaagccgcggcgttgcaggcaatccaggctccgttcccaggtgtctctgcccacggaatcgtacaccacgcgcactttcttaccgccggtgatctcttttaaccgctcgaccagatcctcttcacgatagttaataacctgccacgcgcccgcttttagcgcgctctgcgctttttgcgcggttcctacggtgccgataagtttcgcgcccagggcttttgcccactggcaggcaattaagccaacgccgccagccgctgcgtggaacaggaactgttcatcgggtttaatttcataggttttgcgcagcagataataaaccgttaagcctttcaggaaggatgccgcagcttgctcaaaagaaattgccgcaggcagaatcgccgctttatccgcaataatgttatgcacagagctgtaagcgcctaacgcgctctgcgcatagactacacgatcgcctgccttaatatgctttacaccactgccgactttactcacgatgcctgctgcttcggtgcctaatccgctgggtaggcttggcggcgggtaaaggccgctgcggatatatgtgtcgataaaattgatgccgatggctttattttcgacctggatttcattctccgccggatcggcaggagtgaactctacggcttgaagtacttccgggccaccgtgcttgtgaaattcaattcgtgttgccatgtgtcctccagaacgtatcgtcagggtctgcttcatatgataaagtttcgacccattctttatctcggtaactccattcactatggcaggaaataaacccttcaacaaacagcaggctgaaccccgcgaacgcgatccacaagttgccgggctgaaagtgcctccgcacagcatcgaagcggagcagagcgtgttgggcggtttaatgctagataacgaacgctgggatgatgtagccgagcgtgtggtagcagacgatttttacacccgcccacaccgtcatatctttactgaaatggcgcgtttgcaggaaagcggtagccctatcgatctgattactcttgcggaaagcctggaacgccaggggcaactcgatagcgtcggtggttttgcttatctggcagagctgagtaaaaatacgccaagtgcggctaacatcagtgcctatgcggacatcgtgcgtgaacgtgccgttgtccgtgagatgatcagcgttgcgaatgagattgccgaagctggttttgatccgcaggggcgtaccagcgaagatctgctggatctggctgaatcccgcgtctttaaaattgccgaaagtcgtgcgaacaaagacgaagggccgaagaacatcgccgatgtgctcgacacaaccgtggcgcgtattgagcagttgtttcagcagccacacgatggcgttaccggggtaaacaccggttatgacgatctcaacaaaaaaaccgctggcttgcagccgagcgatttgatcatcgtcgccgcgcgtccgagcatgggtaaaacaacatttgcgatgaacctcgtcgaaaacgcggcgatgttgcaggataaaccggtacttatcttcagcctggagatgccaagtgaacagatcatgatgcgttctctggcgagcctgagccgcgttgaccagactaaaatccgtaccgggcagctcgatgacgaagactgggcgcgcatttccggcaccatgggtattttgctcgaaaaacgcaatatctatatcgatgactcctccggcctgacgccaacggaagtgcgttcccgcgcacgccgtattgcccgtgaacacggcggcatcgggcttatcatgatcgactacctgcaactgatgcgcgtaccggcgctttccgataaccgtacgctggaaattgcagaaatctctcgcagcctgaaagcactggcgaaagaactgaacgtgccggtggtggcgctgtcccagttgaaccgttctctggaacaacgtgccgacaaacgcccggtcaactccgacctgcgtgaatctggctctatcgagcaggatgcggacttgatcatgtttatctatcgtgatgaggtgtatcacgaaaacagtgatttaaaaggcatcgcggaaattattatcggtaaacaacgtaacggcccaatcgggacggtacgcctgacctttaacggtcaatggagccgcttcgacaactatgcggggccgcagtacgacgacgaataataattattttatgaattaggtaattaaagcaaacacttatcaaggaacacaaatgcaagcggcaactgttgtgattaaccgccgcgctctgcgacacaacctgcaacgtcttcgtgaactggcccctgccagtaaaatggttgcggtggtgaaagcgaacgcttatggtcacggtcttcttgagaccgcgcgaacgctccccgatgctgacgcctttggcgtagcccgtctcgaagaagctctgcgactgcgtgcggggggaatcaccaaacctgtactgttactcgaaggcttttttgatgccagagatctgccgacgatttctgcgcaacattttcataccgccgtgcataacgaagaacagctggctgcgctggaagaggctagcctggacgagccggttaccgtctggatgaaactcgataccggtatgcaccgtctgggcgtaaggccggaacaggctgaggcgttttatcatcgcctgacccagtgcaaaaacgttcgtcagccggtgaatatcgtcagccattttgcgcgcgcggatgaaccaaaatgtggcgcaaccgagaaacaactcgctatctttaataccttttgcgaaggcaaacctggtcaacgttccattgccgcgagcggtggcattctgctgtggccacagagccattttgactgggtgcgcccgggcatcattctttatggcgtcagcccgctggaagatcgctccaccggtgccgattttggctgtcagccagtgatgagtctaacctccagcctgattgccgtgcgtgagcataaagccggagagcctgttggttatggtggaacctgggtaagcgaacgtgatacccgtcttggcgtagtcgcgatgggctatggcgatggttatccgcgcgccgcgccgtccggtacgccagtgctggtgaacggtcgcgaagtaccgattgtcgggcgcgtggcgatggatatgatctgcgtagacttaggtccacaggcgcaggacaaagccggggatccggtcattttatggggcgaaggtttgcccgtagaacgtatcgctgaaatgacgaaagtaagcgcttacgaacttattacgcgcctgactagtagggtcgcgatgaaatacgtggattaatcgttctgtaatatttgattgtctgtgccggatgcggcgtgaatgccttatccggccaataaaatcctaaaaattcaataagttgatgttctttcatgctcttataaaggtcgtgcctctggcggatgtacgtttgtcatgagtctcactctgttgctaattgccgttcgctcctgaacatccactcgatcttcgccttcttccggtttattgtgttttaaccacctgcccgtaaacctggagaaccatcgcgtgtttcaaaaagttgacgcctacgctggcgacccgattcttacgcttatggagcgttttaaagaagaccctcgcagcgacaaagtgaatttaagtatcggtctgtactacaacgaagacggaattattccacaactgcaagccgtggcggaggcggaagcgcgcctgaatgcgcagcctcatggcgctagcctttatttaccgatggaagggcttaactgctatcgccatgccattgcgccgctgctgtttggtgcggaccatccggtactgaaacaacagcgcgtagcaaccattcaaacccttggcggctccggggcattgaaagtgggcgcggatttcctgaaacgctacttcccggaaagtggcgtctgggtcagcgatcctacctgggaaaaccacgtagcaatattcgccggggctggattcgaagtgagtacttacccctggtatgacgaagcgactaacggcgtgcgctttaatgacctgttggcgacgctgaaaacattacctgcccgcagtattgtgttgctgcatccatgttgccacaacccaacgggtgccgatctcactaatgatcagtgggatgcggtgattgaaattctcaaagcccgcgagcttattccattcctcgatattgcctatcaaggatttggtgccggtatggaagaggatgcctacgctattcgcgccattgccagcgctggattacccgctctggtgagcaatagcttcagcaaaattttctccctttacggcgagcgcgtcggcggactttctgttatgtgtgaagatgccgaagccgctggccgcgtactggggcaattgaaagcaacagttcgccgcaactactccagcccgccgaattttggtgcgcaggtggtggctgcagtgctgaatgacgaggcattgaaagccagctggctggcggaagtagaagagatgcgtactcgcattctggcaatgcgtcaggaattggtgaaggtattaagcacagagatgccagaacgcaatttcgattatctgcttaatcagcgcggcatgttcagttataccggtttaagtgccgctcaggttgaccgactacgtgaagaatttggtgtctatctcatcgccagcggtcgcatgtgtgtcgccgggttaaatacggcaaatgtacaacgtgtggcaaaggcgtttgctgcggtgatgtaatgcaggaaagcaggctggagctacccagcctgcagtgaaattaaactgtcgtcgctttcactctttctttatagatgatttttttgatgccatcgttctacgtgagagataataaacgttgttagttcttttattgttaagcttatcccaattatctggaattccttatcctgtttttttgggtggagtaataatttctgcacatctaaccattattaaatttaataataagtatcgggtttgttacgatagaatatttctatatcctcaagaatatgctttgccttattgcctgtgactttctgagattcaattatagtatcgttaaattctaatgttaaagagaactcttttttccgctttgtgtaagtttaaccttatattgattaccaatatcaaataaaaaggtcctgtaatgagaataatcacctttaacctcctcggcaaaacagcaaagcgtgcaaatatacataaagtctttcttacccctgattttgttaactaaatcaataaatgcgtgaaaaactttacttgcaatagaacttgatacttcttctccaggtctaaaaaatcttttgcaatttttaactgtgtttctatgtataaaaagaaatctttggcataagagatatctttattatttagtgcatctagctcaacaggtaaagatgtcgttttgttgctattcacatatgatatattcatatcatcatctccatcgcgagtaataaaattaatcaccattgtagggtagggggctggtcaatcagaaatcatctttataaacttcgattgtttttgtaatgctgtatcattaagttcattaaatcgtacagcagataaatgttctatcaaatttcgctcatttgccgaggattcatcataataaacgtaaaattaatgtatccttacatcgagtaataaacattttttatacaaaaaaagacaggaacgtatttactgggttaaatataatcatcctgcttttcatcacaaaaaccgcagataatccttcctttccccggcagctggcgttatggtcagatggtttttgcaacaaatctcacaataaaaagtttcaacatactgactatttagggaaaaatatgcgcaagatcacacaggcaatcagtgccgtttgcttattgttcgctctaaacagttccgctgttgccctggccagttctcctagtccgcttaaccctgggactaacgttgccaggcttgctgaacaggcacccattcattgggttagcgtcgcacaaattgaaaatagcctcgcagggcgtccgccaatggcggtggggtttgatatcgatgacacggtacttttttccagtccgggcttctggcgcggcaaaaaaaccttcagcccagaaagcgaagattatctgaaaaatcctgtgttctgggaaaaaatgaacaatggctgggatgaattcagcattccaaaagaggtcgctcgccagctgattgatatgcatgtacgccgcggtgacgcgatcttctttgtgactggtcgtagcccgacgaaaacagaaacggttagtaaaacgctggcggataattttcatattcctgccaccaacatgaatccggtgatctttgcgggcgataaaccagggcaaaatacaaaaagccaatggctgcaggataaaaatatccgaattttttatggcgattctgataatgatattaccgccgcacgcgatgtcggcgctcgtggtatccgcattctgcgcgcctccaactctacctacaaacccttgccacaagcgggtgcgtttggtgaagaggtgatcgtcaatagtgaatactgacagagcgggagagcgtgatgctctcccgaatgctgtttttttaatcacacctttatcctttcgctgtcttgctgcaaactgattaagagagttttatcaaggagcagcacatgtggtatcaaaagacgctcacgcttagcgccaaatctcgtgggtttcatctggtaacggatgaaattctgaatcagctggctgatatgccgcgcgttaacatcggcttactgcatctgttgctgcaacatacctccgcctctctgacacttaatgagaactgcgatcccaccgtacgccacgacatggagcgttttttcctccgcaccgttcccgacaacggaaattatgagcatgactatgagggagcagacgatatgccttctcatatcaaatccagtatgctgggaacaagccttgtattgccggtgcataaagggcgtattcagaccggcacctggcaaggcatttggctgggggaacatcgcatccacggcggaagccgtcgcatcatcgcgacactacaaggggagtaaaaaatgaccattagcgagttgctacaatattgcatggcaaaaccaggcgcagaacagagcgtgcataatgactggaaagcgacgcagatcaaagtggaagatgtactgtttgcgatggtgaaagaagtagaaaatcgcccagctgttagcctgaaaaccagcccggagctggcggagctgctacgtcagcagcacagcgatgtgcgtccaagccgccatctgaataaagcgcactggagcaccgtgtatctcgacggtagcctgccagatagccaaatctattatctggtggatgcgtcttatcagcaggcggtgaatttactgccggaagaaaaacgtaaattgctggtgcaactctgaaaggaaaaggccgctcagaaagcggccttaacgattacagcatcggcttaaggaagcgtgccgtgtgacttgcttcgcactccgcgacggtttctggcgtaccggagacgaggatctcgccgccaccactgccgccttctggtcccaggtcgacaatccagtcagcggttttgatcacgtcgagattgtgctcaatcaccacaatggtgttgccctgatcgcgcagtttatgcagtacgtcgagcagttgctgaatatcggcgaagtgcagaccggtggtcggctcgtcgagaatatacagcgtctgcccggtgccgcgtttactcagttcacgcgccagcttcacgcgctgggcttcaccgccactaagggtggttgcggactgccccagtcgaatgtacgtcaggccaacgtccatcaacgtttgcagcttacgcgccagtgcaggtacggcatcaaagaactcacgcgcctcttcgatggtcatatccagcacttcgtggatggttttgcctttgtacttaatctccagcgtttcacggttatagcgtttacctttgcactggtcgcacggcacgtagatatccggcaggaagtgcatctccactttgatcacgccatcgccctgacaggcctcgcagcgtccgccacgaacgttaaagctgaaacgtcccggcgtatagccgcgcgcacgggattccggtacgcccgcaaacagttcgcgcacaggcgtaaacacgccggtataggtcgccgggttagaacgtggagtacgaccaattgggctttggtcgatatcgatcactttatcgaaatgctccagcccctgaatatcgcgatacggtgctggttcggcgatggtcgccccattcaactggcgttgggcaatcgggaacagtgtgtcgttaatcagcgtgcttttaccggaaccactaaccccggtgatgcaggtaaacagacccaccggcagcgtcagcgtcacgtccttcaggttgttgccgcgtgcgcctgtcagcttcagcactttttccggattcgccggaacgcgtttcttcggcacttcaatcttgcgtttgccgctcatgtactgcccggtcaagctctccggcaccgccataatcgcttccagcggaccttctgcgaccacttcaccgccgtgaacacctgcgcccgggccaatgtcgatcacatggtcagcggcgcgaattgcgtcttcgtcgtgctccaccacaatcacggtattaccgagatcgcgcagatggataagcgtacccaacaggcgctcgttatcacgctggtgcaggccgatagacggctcgtccagcacgtacataacgccaaccaggcccgcaccaatctggctcgccagacggatacgctgtgcttcaccgccagaaagcgtttctgcgctgcgggaaagcgtcaggtaattcaggccgacgttaacgaggaatttcagacgatcgccgatctctttaaggattttttctgcaatcttcgcccgctgacctgcgagtttgagattgttgaagaattccatcgcatgaccaatgctcatgtcggagatagcaggcagcggcgtattctcgacatacacgtggcgcgcttcccgacgcagacgcgtcccttcgcagctggcgcacggacgattactgataaacttggctaattcttcgcgtaccgcgctggattccgtctctttatagcggcgctccatattatgcagcacgccttcgaacggatgacgacgaatggaggtatcgccacgatcgttcatgtatttgaattcaatgttttctttgccagaaccgtacaacaccactttatgcacgttcgcgctcaggctgccccacggcgcttcgacgtcgaacttatagtgatctgccaggcttttcagcatctggaaataatagaagttgcggcgatcccagccacggatcgcaccaccagccaggctcagttccggattctggatcactcgatcaggatcgaaatattgctgtacgccaaggccgtcgcaggtcgggcaggcccccgccgggttgttaaagctaaacagtcgcggctccagttcacgcatactgtagccgcaaattgggcaggcgaagttggcggagaacagcagctcttccgctttcgggtcgtccatatccgccactaccgcggtaccaccggaaagctccagcgcggtttcaaaactctcggcaagacgttgggtaagatcgtcacgcaccttgaagcgatcaaccaccacttcaatggtatgtttcttttgcagttccagttttggcggatcggaaagatcgcagacttcgccatcaatacgagcacggatgtagccctggcttgccaggttctccagcgttttggtgtgttcgcctttgcgctctttaatgattggcgcgagtagcatcagacgcttgccttccggctggctcagcacgttatccaccatctggctgacggtttgcgccgccagcgggacgtcgtggtccggacagcgcggctcgccaacgcgggcgaataacaaacgcaaatagtcgtggatttcggtgattgtccccaccgtagaacgcgggttatgagacgtgcttttctgctcaatactgatggcaggagaaagcccctcaatatgatcgacgtccggcttttccatcagactcagaaactgccgcgcgtaggcggaaagggattcaacgtaacggcgctgcccttcggcatataaggtgtcgaaagcgaggctggatttgccagaaccgctaagcccggtcacgacaatgagcttgtcgcgggggataacgaggttgatgtttttgagattatgggtgcgggcgccccgaacttcgatcttatccattcacctttcccggattaaacgcttttttgcccggtggcatggtgctaccggcgatcacaaacggttaattatgacacaaattgacctgaatgaatatacagtattggaatgcattacccggagtgttgtgtaacaatgtctggccaggtttgtttcccggaaccgaggtcacaacatagtaaaagcgctattggtaatggtacaatcgcgcgtttacacttattcagaacgatttttttcaggagacacgaacatggccagcagaggcgtaaacaaggttattctcgttggtaatctgggtcaggacccggaagtacgctacatgccaaatggtggcgcagttgccaacattacgctggctacttccgaatcctggcgtgataaagcgaccggcgagatgaaagaacagactgaatggcaccgcgttgtgctgttcggcaaactggcagaagtggcgagcgaatatctgcgtaaaggttctcaggtttatatcgaaggtcagctgcgtacccgtaaatggaccgatcaatccggtcaggatcgctacaccacagaagtcgtggtgaacgttggcggcaccatgcagatgctgggtggtcgtcagggtggtggcgctccggcaggtggcaatatcggtggtggtcagccgcagggcggttggggtcagcctcagcagccgcagggtggcaatcagttcagcggcggcgcgcagtctcgcccgcagcagtccgctccggcagcgccgtctaacgagccgccgatggactttgatgatgacattccgttctgatttgtcattaaaacaataggttatattgttttaaggtggatgattaaagcatctgccagccataaaaaagaagcctccgttatggaggcttctacgtatcaggtcaaaatcattggccattgtggcggtgtctgattcatctcttctatcatcacgctctcgatgttgtgccagatagcggtgatgtccgccattgtgatgccaagcaaccccattgcgaaccaacaggcggaaacaacgcccagaccgctgctgatcaccgcaagcccgacataatcagaccgacgaaaacggatgttgagtgtgctggccagaaacatcattacggcactaagaagttgccagcgaagaagaaccacgccagtggtgagggtagccatcaaacaattcctctgaaaagagccgatgccctggacagcgcggcgttgttcacgggaggcgtggtacactctggctatcgcggggcttgcagaacacaaaaatgaaacactctgtttgtttcattaattttgtgaactatatcacaattgattgtttgttagccatattaggccgtgacttttattgctgtacagattatgtggtttttcagtggcattaagggcatatcttcccgccgcctctgcattcctgtaggaaattaattttgaatatcaatgaattattttcatccaggtgacgattagaaaggtatcaatttcaaatcaggcaaaagtgctatttataccgtaagatttatctaaagacgtcggtacccagggttttcaccttgcaatggccgggtataaacaggcaggaaattgatagcaatgagtcatcgtgcacgacaccaattactggcgttgccgggcattatctttttagttctctttcccatcattcttagcctatggattgccttcctttgggcaaaaagtgaagtgaataatcagctccgaacctttgctcaactggcactggataaatccgagctggtcattcgccaggcagatttagtgagcgatgcagctgaacgctatcaggggcaagtttgcactccagcccatcaaaagcgaatgttgaatattattcgtggctatctttatattaatgaattgatctatgcccgtgataaccattttttatgcagtagcctgatagcgcctgtaaacggctatacgattgcaccggccgattataagcgtgaacctaacgtttctatctattattaccgcgatacgccttttttctctggctataaaatgacctatatgcagcggggaaattatgtggcggttatcaaccctctcttctggagtgaagtgatgtctgatgacccgacattgcaatggggtgtgtatgatacggtgacgaaaacctttttcagcttaagcaaagaggccagcgcagcaacgttttctccgctgattcatttgaaggatttaaccgtacaaagaaatggctatttatatgcgacagtttatagcacaaaacgcccaattgcagccattgttgcgactagttatcaacgtcttataacccatttttataatcatcttatttttgcgttgcccgccggtattttggggagtcttgttctgctattactctggctacgtattcgacaaaactatttatctcccaaacgtaaattgcaacgcgccctcgaaaaacatcaactttgtctttattaccagccaataatcgatatcaaaacagaaaaatgtatcggcgctgaagcgttgttacgttggcctggtgagcaggggcaaataatgaatccggcagagtttattccgctggcagaaaaggaggggatgatagaacagataactgattatgttattgataatgtcttccgcgatctgggcgattacctggcaacacatgcagatcgctatgtttctattaacctgagcgcctccgattttcatacgagtcggttgatagcgcgaatcaatcagaaaacagagcaatacgcggtgcgtccgcagcaaattaaatttgaagtgactgagcatgcatttcttgatgttgacaaaatgacgccgattattctggctttccgccaggcaggttacgaagtggcaattgatgattttggtattggctactctaacttgcataaccttaaaagtttgaatgtcgatattttgaaaatcgacaaaagctttgttgaaacgctgaccacccacaaaaccagtcatttgattgcggaacacatcatcgagctggcgcacagcctggggttaaaaacgatcgctgaaggcgtcgaaactgaggagcaggttaactggctgcgcaaacgcggcgtgcgctattgccagggatggttctttgcgaaggcgatgccgccgcaggtgtttatgcaatggatggagcaattacccgcgcgggagttaacgcgcgggcaataaaattacaggcggtggcgataatcgctgggagtgcgatcaaactgccgacggaaaacgcgggagaaggtctgctggctgacataacccaggtccattgcgatatcaaaaatcggacgctcggtggtgcgcaactcaacggcggccagtaacaggcggcgttggcgaatgtaatcgccaagcgtctgatgcgtcaccgtgcggaacattcgttgcaagtaccacttactatagccacttttttttgcgactacatcaatgttaagcggctggtcaatatgctcgtcaatccatgcgataagatcctgaataattttctgatgggacataaatctgcctcttttcagtgttcagttcgttaattcatctgttggggagtataattcctcaagttaacttgaggtaaagcgatttatggaaaagaaattaccccgcattaaagcgctgctaacccccggcgaagtggcgaaacgcagcggtgtggcggtaagcgcgctgcatttctatgaaagtaaagggttgattaccagtatccgtaacagcggcaatcagcggcgatataaacgtgatgtgttgcgatatgttgcaattatcaaaattgctcagcgtattggcattccgctggcgaccattggtgaagcgtttggcgtgttgcccgaagggcatacgttaagtgcgaaagagtggaaacagcttagctcccaatggcgagaagagttggatcggcgcattcataccttagtggcgctgcgtgacgaactggacggatgtattggttgtggctgccttagccgcagtgattgcccgttgcgtaacccgggcgaccgcttaggagaagaaggtaccggcgcacgcttgctggaagatgaacaaaactaaagcgccacaagggcgctttagtttgttttccggtctttgtctttctctctatcccgctggtacacaggagggtttcccccgacgtcaacacacctcattcgagcacgtggtggaggttccggttggtgttgatgctttaattgtatgtcaccgacgtttcttcgccagtgtaaaagtatactttttaaccgcaatatttttgtcatctcagacgattttttatcgcaatcctgaacggtatacggctcgataacgctgcaatcttgcgcaccgacgataacgtttgcgcatcaattgcctggtttttcatcgtcaagacaataaaagagaaaaaagcagcaaacttcggttgaaaaagccgctatgatcgccggataatcgtttgctttttttaccacccgttttgtatgcgcggagctaaacgtttgcttttttgcgacgcagcaaattgtcgcaaacctggagcaggaagataacgtttcgctggcaggggattgtccgccacgcatcttgacgaaaattaaactctcaggggatgttttcttatgtctacgccaagtgcgcgtaccggcggtagtctcgacgcctggtttaaaattagtcaacgtggaagcactgtccgtcaggaagtggttgccgggttaacaacgtttctggcgatggtctacagcgtcatcgtcgttccaggtatgttgggtaaagcaggcttcccgcctgcggcagttttcgttgcaacctgtctggttgccggactcggttctatcgtgatgggtctgtgggctaatctgccgttggcgattggttgcgccatctccctgacagcgtttaccgcattcagcctggtgctggggcaacatattagcgtacctgtcgcgctgggtgccgtgttcctgatgggtgtgctgtttacggtaatttctgccacgggtatccgtagctggattttgcgcaacttgcctcacggtgtggcgcacggcacggggattggtatcggtctgttcctgctgctcattgccgctaacggtgtcggtctggtgattaaaaacccgcttgatggtctgcccgttgcgctgggtgatttcgcgaccttcccggtgattatgagtctggtaggtctggcggtgatcatcggcctggaaaaactgaaagtccctggtggcattctgctgaccattatcggtatcagtattgtcggtttgatcttcgatcctaacgtccatttctccggcgttttcgccatgcctagtttgagcgatgaaaacggcaatagtctgattggcagcctggacattatgggcgcgctgaatcctgtagtcctgccaagcgttctggcgctggtgatgacggcagtatttgatgccaccggaactatccgtgccgtcgccggccaggcgaacctgctggataaagatgggcagatcatcgacggtgggaaagcactgaccactgactccatgagcagcgttttctctggcctggtgggtgcggctccggcagcggtatacatcgagtctgcggcgggtacggcggcgggcggtaaaaccggtttgacggctatcaccgttggcgtgctgttcctcctgattctgttcctctctccgctctcttacctcgttccggggtatgcaacggctccggcgctgatgtacgttggcctgctgatgctgagcaacgtggcgaaaatcgactttgctgattttgttgatgcgatggcgggtctggttacggctgtattcatcgtgctgacctgtaacatcgtaacaggcatcatgatcggcttcgcgactctggtgattggtcgtctggtttccggcgaatggcgcaagttgaacatcggtacggtcgttatcgccgtggcgctggtgaccttctatgcgggtggctgggctatctaatctttcatcggattctgaaaacgggtggcaatggctgcccgtttttattttctccgcacattgtgtgagcttttgcgatattctgaaaaaaatgagaattcaggcataacgtctttctcagatcataaaaaacatcgcaaacagggaacgcatggaaatcttcttcaccatactgataatgaccctcgtggtcagcctgtccggggtggtcactcgtgtcatgccctttcagatcccgcttccgcttatgcaaatcgccatcggtgcgctactggcgtggccgacgtttggtttgcatgtggagtttgatcctgaactctttttagtcttgtttatcccgccgttgctgttcgctgatggctggaaaacgccgacccgtgaatttctcgaacatggtcgagagattttcggcctcgcgctggcgctggtggtggtcaccgtggtcggcattggcttccttatttactgggtggtgccgggcattccgctgatccctgcctttgcgctggcggcggtgctttctccgaccgatgctgtggcgctctccgggattgttggcgaagggcgcatcccgaaaaaaatcatgggcattttgcagggcgaagcgttgatgaatgacgcctccggtctggtgagcttgaagtttgccgtagcagtggcgatggggacgatgatcttcaccgtcggcggtgcgacggtcgaatttatgaaagtagccattggcggtattctcgccggttttgtggtgagctggctgtacggtcgcagcctgcgattcctcagccgctggggcggtgatgaacccgcgacgcagatcgtcctgctgttcctgctgccattcgcttcttatctgattgccgaacatattggcgtttccggcatcctcgctgcggttgccgccgggatgaccatcacccgctccggtgtgatgcgccgtgcgccgctggcaatgcgcctgcgtgcaaacagcacctgggcgatgctggaatttgtctttaacggcatggtgttcctgctgttaggtctgcagctgccgggtattctggagacgagcctgatggcagcagaaatcgaccctaacgtcgaaatctggatgctgtttaccaatattattctgatatatgcggcgctgatgctggtccgtttcggctggctgtggacgatgaaaaagttcagcaaccgcttcctgaagaagaagccgatggagtttggtagctggaccacacgagaaatcctgatcgcgtctttcgccggggtgcgtggggcgatcactctggccggtgtgctctctatcccgctgctcttgccggatggtaacgtcttcccggcgcgctatgagctggtgttcctggcggctggcgtcattctcttcagcctgtttgtcggcgtggtgatgttgcctattctgctacaacacattgaagtcgcggatcatagccaacaattgaaagaggaacgtattgcgcgagcggcaacggcagaagtggcgattgtggcgatccagaaaatggaggagcgtctggcggcggataccgaagagaatatcgataaccagctgcttacggaggtcagttctcgcgtcattggtaacctgcgtcgtcgcgccgatggacgtaacgacgttgaaagttccgtgcaggaagagaaccttgagcgtcgcttccgtctggcggcattgcgttctgaacgtgctgaactttaccacctgcgcgccacacgggagatcagcaacgaaacgctgcaaaaattactgcacgatctcgatttgcttgaagcgttgctaattgaggaaaatcagtaagccgaaagcgacgtaaccaggcccgaggtaatctgaaaaaggtgcaatcttttgcacctttaacaggttagctcgggctaacattcatgattctaaaacaaataaattatctctcttttaaagtcaattcattggctgttcttcgacttaacctcaatctgcatcttgcataatatctgcagtaatcttcatagcgactgcatgaagattatcctcagtttgactcatgccagtatgagtggcacaatcttcttcaaagaatttctgtagtgttaccaggatatcactattaatggagatattttcctcaccacggagaatggtaatacccattccctggacgctagcctcatcgaaattaacacgatagagacggatattaaacatccaggcttttgttaaaacagaacagttgaaatggcaattgcttaaattggcattattaaaattaacattagccatattagagtcggtacatataaccatttcgaggaacgtatttgttaaccgcgtaaaaaagagtttgctatcaattaagtttatattctggagggttgctttattcaggttgacacgagacagatcagcatgttcaaagttaattaaatcaagtttagagaagctaaggtcggctctaaataaattaatatatggcgctattactttataaagatttacctcagccatgtatgccatataaaaattactataatcaaggaaggtatttttaatattggctctattcattgttgcattgtagaattgaacatgcatagcggaacaactatttagagttccgtcagtcatttttatctgagcgaaattactgtcatcgagaatacaattatcaaaaagtattttttccattatggcgaaattaaaattcgttttatacatattacagtcctgaaaaatagcgttttgtagtctgcaacctgcaaaattgctattggataaatcttcatctttaatcacgatacctttcaggctaaggtgactaaaatcgtaaccaccatttactgtctgtgggatttcgatagtattattatggacggtgacattatttataaaatataccaccttaatactcacttccttatctttattaaggtaaactcttctcgtaattctatcgtcacatttattatttgcatgactagctatatctataaaatatttatgtattttcctgtccgtttctttcgtgatttttccacttggtaaactatcataaattcttttcattttctgaatcaagcctatcactttttcatgatcatccattttgaaaagagagagggctttattgtcaattaacgtgtttttatgatgtttgctgtaattatcactttttgttttctttgtatgacttggacttgtgacagagtggttatcgttaatcaggcaaagagggaaaaacatattatttaaaccattatagcgcataaaatatccttataattaacaagaaagaaaaggcatattctctgcattatcattttctacgactgtcaaaaatcgctcattttttaatgagtttatttgtttaatattatgggaaaaggtgatgcatttgggagaggaagagtattccccggtcagacgaccggggaaggggagagattaatgcgcgcggccttgctcaacgccaaagccggtctgggagcggataaactgcgcgcggaacagttcacgctcacgcgcgccttccgcactgttatcggttgcgctgaagaaccagatgccgaggaatgccacggtgatagagaacagcgccgggtattcatacgggaagatggctttttcgtgaccaaggatctgtacccaaatcgtcgggccgaggatcatcagtactactgcggtaatcagccccagccagccacccatcatcgcgccacgcgtggtcagtttgctccagtacatagaaagcagaatgatcgggaagttacagctcgccgcgatggcaaacgccagccccaccataaaggcgatgttctgattctcaaacagcacgccgaggataatcgcaatcacgccgaggatcagtacggtgattttacttacccgcagctcttcacgttcggtcgcgccttttttgaagacgttagcgtacaagtcatggctaaccgcggatgcgcccgccagcgtcagacccgcaaccaccgcgaggatagtggcgaaagcaaccgcactaataaaaccgaggaacaggttgccgcccactgcattcgccaggtgaacggccgccatgttgttaccaccaatcagatggcccgccgcgtctttatattccggattcgcaccaaccagcatgatcgcgccgaagccgataataaaggtcagaatatagaagtagcccataaacccggtggcgtagaacacgctcttacgtgcttcgcgggcatcgctgactgtaaagaagcgcatcagaatgtgcggcaagcccgccgtaccaaacatcagtcccagacccagagagagcgcggagatcggatctttcaccagcccgcccggcttcatgatgtcgacacctttcgggtgtaccgccatcgcttcactgaacagattgttgaagctaaagccgacgtgtttcatcaccataaaggccataaagctggcaccgaacagcaacagcacggctttgataatttgcacccaggtggtcgccagcatgccgccgaacaggacgtacatcatcatcagcacgccgaccagcaccaccgcaatgtgatagttaaggccaaacagcagctcgatcagtttacctgcgcccaccatctgggcgataaggtaaagcgccaccaccaccagagaaccacaggcgctaagaatacgaatcggcccttgtttcagacggtaagaggccacatcggcaaaggtgtagcgccccaggttacgcagacgttcggcaatcaggaacaaaatgatcggccagcccaccaggaagcccaggctgtaaattaagccgtcatagccggaggtaaacaccagcgcggagatccccaagaaactggcggcggacatatagtccccggcaatcgccagcccgttctggaagccagtgatattgccgcctgcggtgtagtagtcgctacgagaacgtacgcgtttacttgcccagtaggtaatgccgagcgtaaacacgacgaaaatcaggaacataataatcgcctgccagttcgttggctggcgctctacggccccgctaatagcatccgcggcgttagctgcgaaagggagtgtggcggcaagcgccgtcagaactcttttcatgatgcttgtacctcatgcagttatttcaacttgcttgtacctcatgcaggacttcattattaagacggtcgaattcgccgttcgcccgccagatgtagataccggtgagaacaaaggagatcacaatcactccaacaccaattggaataccgcgtgtgacgctggtgttcggattcagcggcgtgcccagccagccgggcgcgaaggcgatcagtaaaataaagccgatataaactgccagcataataatgctcaggatggtggcaaaccgttgccgtttttcgactaactccctgaaatgcgcattgtcttctatccgctgataaatagtgccattcatcacagattctccagaggtaatgtagggattgttttaattcccgctcccttatgggagaaggttaacgctcgggtaacccttgccgaatgtaggccggataaggcgtttacgccgcatccggcaatcaatgcctgatgcgacgctgtcgcgtcttatcaggcctacaaaccgttaccgactcgcatcgggcaattgtgggttagcttggcatcgcgatagcctgcttctcttcaagcagcttctcgactacgccaggatcggcaagcgtgctggtatcgcccaggttgctggtatcgcccgccgcaattttgcgcagaatacggcgcataattttgccggagcgggttttaggcagggagtcggtccagtgcagcacgtctggcgtcgccagcgggccaatctctttacgcacccagttgcggacttctgcgtacagttctggactcggttcctccccgtgattaagcgtgacgtaggcgtagatcgcctgacctttaatattgtgcggaatacctactacggcggcttcggcaatcttcggatgcgccaccagcgcgctctcaatctctgccgtccccagacggtgaccggagacgttcagcacgtcgtccacacgcccggttatccagtaatagccatcttcatcgcgacgcgcgccgtcgccgctgaaatacatatttttgaaggtggagaagtaggtctgttcaaaacgttcgtgatcgccaaacagcgtacgcgcctgacccggccaggagtcggtgattaccaggctaccttcggtggccccctccagcgggttaccttcgttatcgaccagcgccggttgcacgccgaagaacggacgtgttgcgctaccggctttcagctcggtagcgccaggcagcggggtgatcatgaaaccgccggtttcggtctgccaccaggtatcgaccaccggacatttctcgttgccgatttttttccagtaccactcccacgcttccgggttaattggctcgcccacggaaccgagaatgcgcaggctgctacggtcggtgccttcgatcgctttatcgccttccgccatcagcgcgcggatcgccgtgggtgcggtatagagaatattgacctgatgcttgtccaccacctgcgccatacgggcaggcgtcggccagttgggtacgccttcaaacatcagcgtggtcgcaccgcaggccagcgggccgtacagcaagtaactgtgtccggtcacccagcccacatcggcggtgcaccagtagatatcacccggatgataatcaaagacatatttaaaggtcagcgccgcgtacaccagataaccgccggtagtatgcagcacaccttttggcttaccggtagaaccggaggtgtagagaataaacagcggatcttcggcgttcatctcttccgcctggtgctgatcgctcgcttgctcaaccaggtcgtgccaccacaggtcgcgcccttcctgccagtcaattttcccgccagtacgcttcagtaccaccacatgctctacgctggtgacgttcgggtttttcagcgcgtcatcaacgtttttcttcagcggaatactgcgcccggcacgcacaccttcgtcggaagtgatcaccagtcgactgttggaatcaataatgcgcccggcaacggcttccgggctgaagccgccgaaaatcacgctatgcaccgcgccaatgcgggcgcaggccagcatcgcaaccgcggcttccggcaccatcggcatataaatcgccaccacatcaccttttttaatgcccagctcgagcagggtattggcgaagcggcagacgtcgcggtgcagctctttatagctgatatgtttgctctggctggcgtcgtcgccttcccagatgatggcggtacgatcgccgttttcttgcagatggcggtcaaggcagtttgccgccagattcagcgtgccgtcctcgtaccatttaatggacacattaccgggggcaaaggaggtgtttttcaccttctggtaaggtttgatccagtcaagaatttttccctgttcgccccagaaggtatcaggtacgttaatagattgttgatacatcgcctcgtactgctgagggtttatcaggcaacggtctgcgatgttggcaggaatggtgtgtttgtgaatttggctcatgcttttgttctccttgtaggatgttaataatatgtggcataagcgttaaatgtaggggtattggcagttttgtttagtatttgggcgacagatcacgcaaaagtagaattgtgcaaataaacggcagggtaatttttgaaggtcagcaacaaaagttgattaattctttgaggaacatgcagttatgcatgctgttgaaaaagaggaagatactgactaactctaaagtggtattttacatgcacttacaattgattaaagacaacattcacagtgtggttatttgttacacataggggcgagcaatgtcatgacagtgtaggtgcggttactgtcgtgaaaaacaataaaaaccgccattgcaacaatggcgcaattcggatgaagcccctatgacaaggataaaaataaacgcacgccgtatcttcagcttattgattccttttttctttttcacttctgttcacgctgaacaaacggctgctcccgcaaaacctgtaactgtggaagcgaagaatgaaacctttgccccgcagcatcccgatcaatatctctcctggaaagccaccagcgaacagagtgagcgtgttgacgccctggcggaagatccacggctggtgatcctgtgggcggggtatcccttcagccgcgattacaacaagccgcgtggacatgcttttgctgtgaccgatgtgcgtgaaaccctgcgtaccggtgcgccgaaaaacgctgaagatggtccgctaccgatggcatgctggagttgtaaaagcccggatgtggcgcgtctgatccagaaagacggcgaagatggctacttccacggtaaatgggcgcgcggcggtccggaaatcgtcaacaacttaggttgtgccgattgccataacaccgcctctccagagttcgccaaaggcaaaccgaagttaaccctttcccgtccgtatgcggctcgcgcgatggaagccattggtaaaccttttgagaaagccggacgtttcgaccagcaaagcatggtttgcggtcagtgccatgtggagtattacttcgacggcaaaaacaaagcggttaaattcccgtgggatgacggcatgaaagtcgaaaatatggagcagtattacgacaaaattgccttctctgactggactaactccctgagcaaaacgccaatgctgaaagcgcagcacccggaatatgaaacctggacagcgggcattcacggtaaaaacaacgtgacctgtatcgactgccatatgccaaaagtgcagaacgccgaaggcaaactctacaccgaccataaaattggtaatccgtttgataacttcgcccagacttgtgcgaactgccatacccaggacaaagctgccttgcaaaaagtggtcgcggaacgtaagcagagcattaacgacctgaaaatcaaggttgaagatcaactggttcacgctcacttcgaagcgaaagcagcgctggatgcaggcgcgacggaagctgaaatgaagccaattcaggacgatatccgtcatgcccagtggcgctgggatctggcgatcgcttcccacggcattcatatgcacgcaccggaagaaggtttacggatgctcggtacggcgatggataaagcggcggatgcacgcaccaaactggcgcgcctgctggcgaccaaaggcatcacccatgaaatccagatcccggatatcagtaccaaagagaaagcccagcaggccattggcctgaacatggaacaaatcaaggccgagaagcaggacttcatcaaaacggtgatcccgcagtgggaagaacaggcacgtaaaaacggtctgttaagccaataaccccgttccgcctcgcaaggggcggaaaacacaatggagtgaatatgagcgtattacgtagcttattaactgccggggtgctggcgagcggcctgttgtggagcctgaacggaattaccgctacccctgcggcgcaggcatctgatgatcgctacgaagttacccagcagcgtaacccggatgccgcctgtctggactgtcataaaccagataccgaaggtatgcatggaaaacatgcttccgttatcaacccgaataacaaactgccggtcacctgcaccaactgtcacggccagccaagtccgcaacaccgcgaaggggtgaaagatgtgatgcgctttaacgagccgatgtacaaggttggagagcagaacagcgtctgtatgtcctgtcatctgccggaacagttgcaaaaagcgttctggccgcacgatgtccacgtaaccaaagtggcgtgcgccagctgccattccctgcatccacagcaagatacgatgcagacgttaagtgacaaaggacggattaagatttgcgtcgattaccacagcgatcagcgcaccaatccgaactttaacccggcgtctgttccgttgcttaaggagcagccatgacctggtctcgtcgccagtttctcaccggcgtcggcgtgctggcagccgtcagcggcaccgcagggcgcgtggtggcgaaaacgttgaatatcaatggggtgcgttacggcatggtgcatgacgagagcttatgcatcggctgtaccgcctgtatggatgcttgtcgggaagtgaacaaggtgccggaaggcgtcagccgcctgacgattattcgtagcgagccgcagggcgaatttcctgatgtgaaatatcgcttcttccgtaagtcttgccagcactgcgatcatgcgccgtgcgttgacgtctgcccgaccggtgcgtcttttcgcgatgctgccagtgggattgtcgatgttaatccggatctctgcgtcggttgtcagtactgcatcgccgcctgtccgtaccgcgtgcgctttatccatccggtcacgaagacggcggacaaatgcgatttctgccgtaagaccaatttgcaggccggtaagttgcccgcgtgcgttgaagcttgcccgaccaaggcgctgacgtttggcaatctggacgatcccaacagtgagattagccaactgctgcgccagaagcccacttaccgctacaagctggcgctgggaaccaaaccgaagctgtaccgcgtaccgtttaaatacggggaggtgagccaatgacgcagacttccgcatttcattttgaaagcctggtgtgggactggccgattgccatctacctgtttttgattggtatttctgctggtctggtgacgctggccgtgctgttacgtcgcttctacccgcaggcgggcggtgcagacagtacgttgctgcgcaccacgctgattgtcgggccgggcgcggtgatcctcggtctgttgatcctcgtcttccacctgacaagaccgtggaccttctggaagctgatgttccactacagttttaccagcgtgatgagcatgggggtgatgctgtttcagctctacatggtggtgctggtgctgtggctggcgaaaatctttgaacatgatttgcttgccctgcaacaacgctggttgccgaagctggggatcgtgcaaaaggttctgagcctgctgacgcccgttcatcgcggactggaaacattgatgctggtgctggcggtgttgttgggggcttataccggctttctgctgagcgcgctgaaaagctatccgttcctcaataacccgatcctgccggtgctgttcctcttctccggcatcagctccggtgcggcggtggcgctgatcgccatggcgatacgccaacgcagtaacccgcattccacggaagcgcagtttgtacaccgtatggaaatccctgtggtatggggtgaaatcttcctgctggtggcgttttttgtcggtctggcgctgggcgatgacggtaaagttcgtgcgctggtggcggcattaggtggcggtttctggacgtggtggttctggcttggtgtcgccgggctggggctgattgtgccaatgctgctcaaaccgtgggtcaatcgcagttccggcattcctgccgtgctggcggcgtgtggggccagtctggtcggcgtgttgatgctgcgctttttcattctctacgccggacagttgacggtggcgtaagccagaaaagaggtggtttctggacgtattccttcctgaagtcggttttctggcgttgttgttaagtctcggggtcaacgtgttgaccccgttgacggccttcgcgggagtgcggttgcgctggcctgccatgatgcgactcacttgcatcggcattctggcgcagttcgcgctcctgctgctcgcctttggcgtactgacgtattgttttctcatcagcgatttcagcgtcatttatgtcgcgcaacatagctatagcctgctgagctgggaactcaagctggcagcggtgtggggcggccatgaaggtagcctgctgctttgggtgctgctgctttccgcctggagcgcgctgtttgcctggcattatcggcagcaaaccgatccgctatttccgctgacgttagccgttttatctctcatgctcgccgcactgctactgtttgtggtgctgtggtccgatcccttcgtgcggatatttccaccagcaatcgaaggccgcgatctcaatccgatgctgcaacatcccggtcttatctttcatccaccgctgctttaccttggctatggcggtttgatggtagcggcgagcgtggcgctggcgagtctactgcgcggcgagtttgatggtgcctgcgcccgaatttgctggcgctgggcgttacctggctggagtgcattaacggcggggatcatcctcggttcctggtgggcctactgcgaactcggctggggcggctggtggttctgggatccggtggaaaacgcctctttattaccctggctttctgccactgcgctgctgcacagtttgtccctgacacgccagcgggggattttttgccactggagcctgttgctggcgatagttactctgatgctgagcctgctgggcaccttaattgtccgttctggcattctggttagcgttcatgcgttcgcgctggataacgtccgcgccgtgccgttgttcagcctgtttgcactgattagccttgcgtctctggctctgtatggctggcgagcgcgggacggtggcccggcggtgcattttagcgggttaagccgggaaatgttaatcctcgctacgctgttgctgttttgcgcagtgctactgatcgtgctggtgggaacgctttatccgatgatttacggcctgctgggctggggacgcctctccgttggcgcgccgtattttaaccgcgcgacgttaccgtttggtctgttgatgctggtggtgattgtgctggcgacgtttgtctctggcaaacgcgtgcagcttccggcgctggtagctcatgcgggcgtgctgttatttgccgctggggtcgtggtctccagcgtcagccgtcaggagatcagcctgaatttacagccgggtcagcaggtgacgctggcaggatacaccttccgttttgagtgcctcgatctacaagccaaaggcaattacaccagcgaaaaagcgatagtggcactgtttgaccatcagcaacgcattggtgaactgacgccggagcggcgtttttatgaagcacgccgtcaacaaatgatggaaccgagtattcgctggaacggcatccatgactggtatgcggtcatgggggagaaaactgggccggatcgttacgcttttcgtttgtatgtacaaagcggtgtgcgctggatctgggggggaggattgttgatgattgcgggcgcattgttaagcggatggcgggggaagaagcgcgatgaataaagggcttctcacgctactgctgttatttacctgttttgcgcacgctcaggtcgtagacacctggcaattcgccaatccgcaacaacagcaacaggcgttaaatattgccagccagttacgttgtccgcagtgccagaatcaaaacttactggaatccaacgcgccggtggctgtcagtatgcgccatcaggtttacagcatggtggcggaggggaagaacgaagtcgaaatcattggctggatgaccgaacgctacggagattttgttcgctataacccaccgttaacgggtcagacgctggtgttatgggcgctgccagtggtgttgttactgctgatggcactgatcctctggcgagtgagggcgaagcgatgaaacagcccaaaataccggtgaaaatgctgacaacactcacgatattgatggtatttctctgtgtcggcagttatctgttaagcccaaaatggcaggcggtacgtgcggagtatcagcgtcagcgcgatccgctacatcagtttgccagccagcaaaccccggaagcgcagcttcaggcattgcaggataaaatccgcgctaatccacaaaacagcgaacagtgggcgttactgggcgagtactatctgtggcaaaacgattacagcaatagcttgctggcgtaccgtcaggcgttgcaactacgtggtgagaacgctgaactgtatgcggcgctggcgacggtgctttattaccaggccagccagcatatgaccgcccagactcgcgcaatgatcgacaaggccctcgcgctggacagtaatgaaatcaccgccctgatgctgctggcttccgatgcgtttatgcaggcgaactacgcgcaagccatcgaactatggcaaaaagtgatggatctcaacagtccgcgagttaaccgaacacagctggttgagagcattaatatggcgaaattgttgcagcggagattggattaatcatctggtgatgaagattatgtcattgagctgcataaaaaataatcgaatgaacatatgccaaaaataatcactaatcagtattattgcagattaaacaaataaaaatctttccataacaaatggttattcattaatcctgccataaactcgcgttattatgcattaatgcagcgaaaagctctgttgttaaagggttgcgcaacataccgcgcaaatgatactgatcataagcgttaaaaaaatctacaaaccaacgcaacacaattcatgccccggcagtatgtcacgttctcgcgtttctgaacggggaacggcgctccattgaggaagtcattcatatgaaaaatataaaattcagcctggcctggcagattctgtttgctatggtgctgggcattctcctgggaagctacctgcactaccatagcgacagccgcgactggctggtcgtcaatttgctctctccggcgggtgatatcttcatccatctgattaaaatgattgttgtgccgattgtgatctccacgctggtggtgggtatcgcgggtgttggtgatgccaaacagctcgggcgtattggcgcgaaaaccattatctacttcgaggtgatcaccaccgtcgccatcattttggggatcactctggcgaacgtcttccagcccggtgccggggtggatatgagccagttggcgaccgtcgatatcagcaaatatcagagcactacggaagcggtacaaagcagttcccacggcattatgggcacgattttgagcctggtgccgacgaacattgtggcgagcatggcgaaaggcgaaatgctgccgatcatctttttcagcgtgctgtttggtctggggctttcttccctgcccgcgacgcatcgtgaaccgctggtgaccgtgttccgctccatctctgaaaccatgtttaaagtgactcacatggtgatgcgttatgcaccggtgggtgtgtttgcgctgattgcggtgacggtggctaactttggtttcagctctctgtggccactggcgaaactggtgctgctggtgcatttcgccattctgttcttcgcgctggtagtgctgggaattgtggcgcgcctgtgcgggttaagcgtctggatcctgattcgtattctgaaagatgagctgattctggcgtactccactgccagctctgaaagcgtgctgccgcgaattattgagaagatggaagcctacggagcaccggtgagcatcaccagtttcgtggtgccgaccggttactcttttaaccttgatggtagcacgctgtatcaaagtattgccgctatcttcatcgcgcagttgtatggcattgacctgtccatctggcaggaaatcattctggtgctgacgctgatggtgaccagcaaagggattgctggcgtgcctggcgtgagctttgtggtgttgctggcaacgctgggtagcgtaggtattccgctggaaggtctggcgtttattgctggtgttgaccgtatcctcgacatggcgcgtactgcgctgaacgtggtgggtaatgcgctggcggtgctggtgattgccaagtgggaacacaaatttgaccgtaagaaagcgctggcttatgagcgtgaagtgctgggcaaatttgataaaactgcggatcaataattgaagattgccggggatatccacccggcaatgtgtgaatgcctgatgcgacgcttgccgcgtcttatcaggcctacgccagacagcgcaatagcctgatttagcgtgattttgtaggtcggataaggcgtttatgccgcatccgacatcaacgcctgatgcgacgcttaacgcgtcttatcaggcctacgccagacagcgcaatagcctgatttagcgtgattttgtaggtcggataaggcgtttacgccgcatccgacatcaacgcctgatgcgacgcttgccgcgtcttatcaggcctacgccagacagcgcaatagcctgatttagcgtgattttgtaggtcggataaggcgtttatgccgcatccgacatcaacgcctgatgcgacgcttaacgcgtcttatcaggcctacgccagacagcgcaatagcctgatttagcgtgattttgtaggtcggataaggcgtttacgccgcatccgacatcaatgcctgatgcgacgcttgccgcgtcttatcaggcctatcttaaccgttggttaatttttcaaactcttcacacccggtatcaaacccttccatacagctcaggttcaaccagtgcagcgccttttgcttgttcttctcgataaaaccttcttcaccgtttaagaacatcattcccgcccagtactcggaataaccggttcgggaaattgcagagctgcgtttgaaataccaggttgccttgtcatcgtcggccttaatgcccacgccgttggcgtaaatcaaaccaagcagcatttgggcatcgacggcagagtcgttctccagatcttcgctggcgttttctaacaggctaattgcctttggataatccggtttacccgcttgagtatttaccagaatatgcgccagcgttacttcaccttctttactgcccgcttgcgccgctttctctgcaagaacttttgcttgtggatagtccagactgaccggattggtgattttgatctgcgccagcagcgcgcaggcatcagcatcaccgctgtcggcggctttctgtgcccaatattcggctttgctcaaatcgccggagctaaaccagctgtcggcaagaaaatattgtgcgcgtcggtccccggcctctgctgcctttaaatactggctgccaggctcggagtcgttggcgtgggcaaagaatgtcaaaaacaacatcaatgcgataatttttttcattttgataatacgattgggtagggagtaaccagtataaagagttcgaatggataaaaaaacagcctccgaaaggaggctgtagaaaggacggtattacgccagtgccgcttcgcgcaggcgagttttcaacttgttgtactcgtcaatcacgtactgctcggcggcgcgctgatcggcgatcggctcgacgcgaacggcgcagtatttgtactccggcgttttcgtaatcgggcttaagttttcggtaaccagctcgttacaggcaccaatccaccactggtaggtcatgtaaatcgcccctttgttcggacgatcgctgacctgcgcacgggtgataattttgcctttacggctgtgcacccaaaccaatgcctcatcttcaatacccagacgtttggcgtcttcggtattgatttgtgcgtagccaggttcatcagccagcgccgccagtgccgcacagttaccggtcatgctacggcaagagtagtgaccaacttcacgcaccgtactcagtaccatcgggtactcgtcggtgagtttgtcgattggcgctacccagtcgcaggtgaagaactgcgccagaccgttcggggtatcaaacttctctttaaacagataagaagtcccctgatcggcatcactagtatcgcggcaaggccactgaatgaagcccagttcgcccattttctcgtaagtcgcaccgtagaaatccgggcacagatgacgcaactcatcccagatctcctgggtgttgttgtagtgcatcggataacccatacgggtggcgatttcactgatgatttgccagtccgttttcagatcccatttcggttcaaccgccttgaagaaacgctggaagccacggtcagccgcagtaaacacgccttcatgctcgccccagctcgtactcggtaaaataacatccgccgcgctcgcggttttggtcataaagatgtcctgaacgataaccagttccagatcttcaaaggctttacgtactgcgctcagctccgcgtcagtttgtagcggatcttcgcccataatgtacgcggcacgcacttcgccatgcgctgcgcggtgcggcagctcgctgatgcgatagccggtatgcgctggcaggctttccacgccccaggctttggcgaatttctcgcggttagccggatctttcacgtactggtatcccggatacgtatccggcagcgcgcccatatcgcaggcaccctgaacgttgttctgaccacgaaccgggttaacacccgcatgcggcttaccgaggttaccggtcagcatcgcgaggctggtcagagaacgcacggtttccacgccctggtagaactgggttacacccatgccccacaggatggcggcgcttttcgcctgggcatacatccgtgccgcctgacgaatctcactggcgctgacgccggtgatatcttcaacgctctccggcgtgtagccttcaacgattttacgatactcttcaaagccttctgtacgactagcgacgaacgctttgtcgtacagattttcttcaataatgacatggcccatcgcattcaacagcgcgatgttgctgccgtttttcagtgcaatgtgcatgtcagcaatgcgcgcggtttcaattttgcgcggatcgcagacgataattttcgccccgttacgtttagcgttaattacgtgattcgccacgattgggtgggaatccgccgggttgtacccgaaaacgaacactaaatcggtattatcaatttcgttaatagcattgctcattgcgccattaccgacgctttggtgcagacctgcaacgcttgggccgtgtcagacacgagcgcagcagtcaacgttattggtaccaataacggcgcgcgcaaatttttgcattacatagttggtttcgttacccgtaccacggctggagccggtcgtctggatggcatccggaccgtacttctctttgatggcgctcaggcgctcggcaacgtaattcagtgcctcatcccaggaaacaggttcgagtttgccgccacgctggcgacggatcatgggggttttcaggcgcggggtcaggatctgggtatcgttaatgaagtcccagccataataacccttcagacacagggtaccctggttggttttcccctgcgctgcctccgcccggacgattttgccgttatcgacgaccaggttgattttgcaaccacttgcgcaataggggcaaaccgtgacgacttttttcatcggtctcgctccagttaatcaaatcacgcatacgcgctctcgactacagtatgcatcttttatgccacattttatgtggggtcattccctgatattacgggcactatttattcaaaactctgacgaaaaacaggctgtcgtcagttttgacgtgacgaaacgaaataccgcgtgacagccatcacgcggcagacattttattttttctcgacgacgggacctgcctgatacccgccgcccaggcttttcatcaactgaatgctttggatcacccggcggctgtccagcatcagtaaactcatctcttcggcaagcactggcaaccgggcttcggtggcctgtaagcggctggttaagccgcgctgataggcggcctcggcagcgcgctgggtaaagcgcgtggcttccacgcgttcagcctgcatttctcgctcgtcgttgagcgtttgcagacgcgtgccgttgacggcaacgtcacgcaccgcgttcagtacactctggttgtaacgttcaatcatcatgttgctggcggcgcgcgtgccttcgagattggcattcaaccgtccaccgtcaaacagcggcaatttcagacccgggatgaagttgaactggcgactggtttttttgaataaggtatgcagatggatggagtccagaccgaaaaacgctttgatatcaaagctcggatagaacaacgcccgcgcggaatccacctgatctaaactcgcctgaacataccagcgcatggcttgcagatccgggcgtctggcgagcaactcataagagagtgtcgccggaatgccggtctggacttgcggtaatgccaccggtctgatctccggcatatcgctggctcccgcgccaatcaatgcacgcagagattctcgcgtttcggtgatttgccctttgacggcaacaatttgtttatcgaccgccagaatctgtgcccgcgcgccgtggaaaggcacttgcgcttccagaccgtgcgccactttactctggtgcgctttcaccgcgtaatcaatcacatcgtgagtttgttctaacagatcgagcatctgatagctggcctgcatactgtaataaagctgcgctacgcccgtggccaggcttagctctactgctgcggtttctgccagcgcggcattatgcgcgccaatggcggcggcaaccgcactgcgatgcacaccccacaaatcaagatccagtccggcaaacaaacctactgtggcttccgtatagtacggcccgtccatacccagtgctggcgcatccatactataagggcttaaaaagccgttcgcgctgacacgttggcggttgagcatccctaacgctgcgacctgtaattgactaccggcatctaacaaatcggcctgggactgcgctttttcttcccgcagtttcgcttcggcgagggtgtgactaccacttagcgtccgttggatcagcgcatccagctgcgggtcattgagttgtttccaccactgcgcctgcggccagccggagctggcaagatgaatatcgtcggccagtttgatttgttccggtttgagctgttgatgaggtgcagaatccttacgtaccagggcacagccggaaatcagcgtcgtgctgccgagaatgctgcacaacagcagacgactaagttgacgattgatcattgcgtggctccttgtgcctgttccgtggcgggcgttaatgccggggctgtccagtctggcaagcgggcgaaaagctggcagacgtgttgctcctgttttaataaggtgggcaggatggcctgagaggcgggtgtctcttcaagcgttatttgaggagaacggctgagtgcggttgccagaccggcagcgtatttctccagggcgtcggcaaactgacctgctctgtccggctgtagtgcgttatccagcgcctgcgcgctgttccaggtggcatcccaggcgtgaagaagatcgcggccctgacgaataaccgtttggctacgttcaatcagtaatgcgcgttcttcgctgtccagttgacgctccagcgccacgcgttggcacatctcttcacaggcattaaacgccgcatgcagaccgatacgaatttgcagataagtgcgcagagccgtgacttcctgctggcgtgggatccgcattactttacttaacatacccagcgtgccagccagtttttgcggcagtgtgcgcgcttcactttcaggccagacaaaggtgtaaatcaccgcggacaccacggtaccaatgatgatacccagggcgcgatcgcgaatttccaccaggtcgtacactgggccaaaaacgttttcgagcgtggcgagcgcgaaggtgaccaccatctgtgtgccgatataagaagagcgttcagagctggtggcaatccatgcgcccaacaggaaaatcggtgccagcacaaacagcaattcgacaatattgtccagccagggcatgaccagtagcgtgaataacagcgccagaatcgcgccgcaaaaggccccgccaaaacgcagcaccatcttctggtagctgctaccgacatttgggttagcgacgatcacgcatgtcagcatacaggtgtgaatgccttcccagtccacgccgctgtaaaaggtgtaacagatcaaacaggcgagcagcgtttttaccgcgtagcgcatatagtctggattggtaaaagcatcggcggccatacttggcggtttggctgcgggcgttggcggcgtattcgggtccatctgacccagttgtaacaacgtctggcagatattctccaggttacattcccgtgccgccatcgcttcactttcactgatccgccagtcgctttgccagcactgaccttcagcaacggcatgctgcagcttgttgatttcactagctaatttttgtcggaattcaataattgcctgagaatcagcaaaagaggtgggatcgtagcgattcagcgtgctgtaaatgtaggttaccgttgccacgcagctttgccaccatgcgttttgagttcgccagttggcatcgtccgcgaggcaaaagacattgagtttttgtagcgccagcgcctctctttcaatccgcgtttcgggtagcggtgcgaggctgtctgtcaggtgactaatggcatcatcaagccgatcattaagcgcctgatgcatttggctaatggcacgactgggaaaccacagcacgccgattaacgtcatcagcaaggttggatagaggccaacaacgatacaccacagcgttaagcgcacgaccacttccggatagtcgagcatggcggggaaggtttgcccgtaaatagcgacaatggcgacggcgaaaaagaccagccccaagcgatgggtgcgcatcaaaaacatgcagcccatcaggatcggtccggcgatgatcaatcggatcaacggttcgccgtaactccatttgtagatcaaaaacaggctgccgatctccagcaccgtggcaaccacaaacaagatcgcgacaaatttggtgtaaaacgcgttgctctgaataccgtaaaacagcactgccaggcttaacgccacaaaagggatctcaaaggtcatgctgatcagaatcaccagcaggcagcctacccagagttgcacggtctgcggcacgcgacctggtcgccgctcgcttaactcttcatgaaagaacgccagcagcctgaccaccggtaatggcagggagttgagcgcgctcattattgcggctcaagattagcgactgcgctagcgccgatgcggaacatttccgggtcaggtttatcgaccatgattttgaccggaaaacgctgggcaacgcggacccagttaatagaacgagacactttcggcaggccgcccagcaccaggccgccgtcatccggtagcacgccgtagccaatgctatccactttaccctcgaaggttttgccgctgtcactcatcaggcgaatcgttgcgggtgtaccactgcgaatatttttcagatcggtttcgcggaagttggcgatcacataccagtgacgagtgtcgattagggtaaaaatagggcgcatggcagaagcaaattgcccgacggaggttttgagggaaatgacccggccatcaaacggcgcgcgaacggtcgccatttccagatgcagtttggtcagggcaatatccgcttcgaccgccgcacgctgggcaactaatgcatccacgccgctgacggcgctggcggcactctgcgcctgtaacaatacggcattaagatccgcttctgcggcgcgctgcgccgttcttgcacggtcaacatcttccgcactgacaaaaccttctttcagtaatggctcggtgcggcgtaatgtatctgtggcctgtttcgcggcggcacgggctttttctatcgtggcattaacgctgtcggcaccaaactgttgcgcgtcaacgctacgctgggtgagcataatttgcttatccagcgccgcgagggaggcttcagctttcgccagattggcttcgtacgggcgcgggtcgatgcggaacagcaaatcgccctgtttgactgcctggttgtcggtgaccgccagttctacaatgcggccgctgacttccggtaccacatcaatggtatctgcactcgcgtaagcgtcattagtacttggcgcactgtctacgcgccagataacgaaaacaagggcaaccagcgccaacgcaaccactaacagagcagggaatttactgcgaggagcttttttcggcgtactttccatgagcgcgtctcaaatagattagaaaaatgccagccagaacagcatggcgtagagagcaaaaagggcggtataaataattccgacaaatgccagattgatatttgcccgctgaataactcgcctcgtgatgagcgtcaaaataaggctggcaatggcgcagaaaaaccagctgggataataagcgccgatcaccgggattgccggagataatgagcatcccgaaaccatgaagacgggaattatccaggctgtttttttgagttgcatcgccatgcgagagagaactgttggcatattaaatacatcctgtctgctgcgaacaatatctgtagtgaatatcaatatccattgaaggcgtcagtatggctattttcttgatgaataaaaatagctttattcagccaccgcattcataacttatatattttatttattaattggctgtatatatttttaaaataaatacttttgggggcttcagcgcccccaaaagcgagtgacattaatttggggttacgatattcacccacaaatcgaaattatccagacaggcgataatttcttccagtttcgcgccattgccaataattttggctttcttcgcttttaccagatccgccattttggcttgtccggtcagcacggcgtgcagatcttcacggctgatgtagaaagaggcgtcggcttgcggttgcagcgttttccggtagttaagcacgctatcgttcagcgtcaggttgaggttatcgccgttgctcatattgaagttcaggctgatatttttacccgcagctttcgcgctatcgaggcgaacggccataaagtcgaacagcatttcgacgctcatcccgcgaatggtgtccggggaaccggtggtgccgtggctgaacttatgcaccccttcgcgcagctctttcgcgccggtcaggtagaaaccgcgccatgtggcggactcggcctgatagcccagctgttcaaagttattcgcttgcagattcttcgcgacctggtcacccgggttggcggcaatcacctgtttcagcagttctgcgctccagcggtaatcaccttgcttgttcgcttcttgcgccaggttgatgacacgggcagaaccgcccagcgcctgcacgtaacgtttacccatctccacctgaccatacggatgcaggttagccgggttaccgtcgtaatagccaagatagaagttatacaccgcgcgggcgttgtggctgacagaaccgtaatagccgcggctggcccagttattggcaagtgcaggcggcagcttaatcatgtcgccgatttcattcatggtgtagccctggttcgccaggtgcagggtctggtcgtgaatgtacttgatggtatcgcggtatttaccaatataatcattgatatgcttattgccccagaccggccaggtgtgcggcataaacagcacttccgcgtcgttaccccacatatccagcgtttcgttcagatactcggtccacttgctggtgtcgcgggttttcgcgccgcgcagagtgtagaagttgtgcagggtatgcgtggcgttctcggcggtacacagggctttcagggccggaatatagaagtgcatttcggctggcgcttcgctacctggggtcatcaggaagtcaaactccaggccgtcgataatcatcttctcgccagttctgacgatagttttcgtcggtgcaataatgctcgggtcgcccgttgccagcgtcacgccaaggccattacccacattgccttgcgcgttgtgcggcagtaacagaccgtaagagtagagcgcacggcggctcatgatgttacccgccagcacgttttcgctgatggcttcgtccataaagcctgcaggggcaatcacctgaactttgccggatttaacatcggcttcagagataatgcctttcacgccaccatagtggtcggtgtggctgtgagtgtagataacggcaacaatcggtttttgcggacgatgctggaagtaaaggtcaagtgcggcttttgcggcaggcggcgtcaccagcgggtcgataacaataatgcctttctcgccctcaacgaacgtaatgttagagatatcctggccgcgcacctgatacattttatcggtgactttgaacaggccagaaataccgttgatttggctctgacgccacaggctggggtttacggtttccggcgctgcggcattaatatcaaatttgtaatcgtccgcgcggtagtaaactttaccgttcgcatcacgcagaataccttcatccagcagcggggcgataaatccacgctgggcatcgtcaaaatcctgacgatcgctaaacggtaaacttttggcgtaattctgattaacctgttgggtatattgagtggcggctttcgcttcctctttcgcgttagcggtatttaccatcatgccgctggcggcagttaacgcaataacaatcctgctcaaacggaataaccgagagttattcatataaatctccatttatcatttatgtcgtaaatatgtaatccatgcaaaatacgtcatttaaagctggcgttatcataattgggaaattgcgactttaataagtggaagtgtgagcggaacgcgccattttattaggcatttgtgctgaagagggaaaattacagtaaaactatcattgcagaaaataatatgagtcgttttatgtgtttattatatatattgtacctgtcgttggcacagcgggacattgcgctactgtgccaacgttttactcatggggctttagcacagaactgtggcaaaaaacgttgatgcgccaatattgctgcaccctgagcgccattaaagtcagaagaactggcggcaataaagcgcacgacctgatgcggcagtggacggcgcaggtacttttgggtcatggcaacgagagtctcgcgtgggaaggcgggcatatccatcacgccaccgcccaggatcaccgcatcgggatcgaacagattaatgctggtggcaatggcccgtgccgcgttttcaagcagactctggacgaaaggggcgttttccgcatggacgaaaagatcgcgcaatgggtaatttcggggctgttgttcgtaccagcgtcttagcgccattccagagcaattggtttccaggcacccaggattgccacacgcgcagtgttgggtcatatctcccagggggatatgacccagttcgcctgccacaccgtgtgcacccgtccacggcgcaccgttcatccacactgcgaaccccatccccgtaccgagataggccgccagaaccagttgttgcgtaaggcggttttctactacgtcccaggagagttgcaggttaacgtcgcgggaaaactcaaccggacaattcagcgtattttcgagcttatcggcgagatcatataaatccgccgctgttaacggcaggttaggcgtagaaataatggtgcgtttatctttactgaccagcgccggaaatcccatcaccagaccatgacagcgagcgttaaagcgcctgagttgctcgtcaatcatttcgccgataccgctcaccaggccgggagcaatgacttctgcggtccgctttttttcgcagtgtagcgtttcaccttctgctgtccgcagacaaaagcggatatgcgttgcccccatatccacgcccgctacgacgttatgctgtttttgcatgaggctgtacctcgctttttgcagccagaatctgcgcggtcataattctccatgcttcgtcgatattttccgcatgattaaacaggccggaagtgccgacgataaagacatccgcccctgccgccatcagtttttcgtaagttgcctggttgcaggaaccgtccacctcaatttcgtactccagaccttctcgttcacgccatgccttcagttcggcaagtttatccagcatttcaggaatgaacggttgtccggcaaagccgggatcgacagtcatgaccgtaattttatcggccttatggatatagtatttcatggcctcaactggcgtctccgggttaaggatcagccccactttcatgtcatgacggcggatttcatcaatcaggcggaacgcctggccgttgatggtttccggatgcagagtgatgaaatctgctcccgcacgcgccagttgagcaatgtaatcctgcggccgcgtcaccatcagatgacagtcgagcggtttagttgccagttttttaacctgacttacgaagaacggactgagtgtcagattggggacaaagtgaccgtccatgatatcgatgtggaagtaatcggcatggctgtcgataaattcgatctgttctttaaatttcagcagatccatacacattaagctgggggagattttcatgttcaattccttacttactgataagacggtcaagggcgacagccgcgataattaatccgcccatcaccaccagttggtaataggtttgtacctgcaaaatattcagaccgttgttgatggtgccgatgatcaacccgccaatcaccacagagaaaatgcgccccttgccgccgaagaaactggtgccgccaatgatggcgctggcaatggcataggtttcaaaacccataccggcaagcggttctgcggcaccgagtcgtgcagtactgacgacgcctgccagacctgcacaaacaccggagatgataaacaccaccaggatgtggaatttcacgtcaatcccggaatagaacgcgctatttttgttgccgcccagtgcgtagatgttgcgcccgagccgcatacgcgttgtcagaaaccaaaggatgagcgcgacaattagactgaagataacggggacaggtatcccaattacgctggcggcaaagaagttcacgaagtcaaaactgaagccgtatacgctgttggcatcggagatcaccagcgtgatcccacggaaaatcgcgttggtgccaagggtgatgatgaacgggtgtagccccgtccagttgaccaggcagccgttgatcgcccccagtgcgccgccaaccagtacaccgccaatcatcgctgcgagaaacgggtcaacacctgccaacatcagtttggcggtcaccataccggaaagcgccagaatcgcgccaacgctgaggtcgataccagcgaccaggatagcgaaaaactcgcccatgccgatcaataccgtcacggagctttgaataaaaatctgggtaatattattggtggtcagaaaatattctggactcaggctaccaaagatggcgacgatgatcgccaggataaaaaaggtgccgtatttatcccagaacagcgcaaagttgaacggtttcttctcgctcgcttcgctttttactcttgtggtaaagcccatgccataatctcctcttcgctcatgtcatcgcgattcgtcaggatttgcgtcagtcgtccttcgcagaacacggcgatgcggtcgcagacggtgataatttcaggtagttcagaactcaccatcaggatgacttttccgtcgtccgccagttggcgcatcactttgtaaatttcggctttcgcgccaacgtcgatgccgcgggtaggttcatcgaaaataatcacttccgggcaacagcacagccatttggagatcaggactttctgctgatttcccccggagagttcggtgatattctggtttacgctatgacatttcagcgccagcagttcgcgttgattttcagcggtacgttgctcgtcaacttcatgaaacaagcccatcgcgcctttatagccgccgtctttcagactgcggctgatcgccatgttctgagcgatggaaaagttggggaaaaaaccgttatcccggcggctttcagtgatgtaagccatcccttttttcacggcatccaggggactacgtggagagatatctttgccattaagacggatttctccgccagcgcgtttatccacgccaaacagacaattcatcagttcagtacgtccggaaccgaccagtccggcaaagcctaatatttctccccggcagacgctaaaactgatatcccggaccttttttctgtcacgactggtgacgttccgcacctcaaaaaccgtttcgtgcgcaaggttgctgacattctccttcatcgcgttaaaacggttttgcagttcgcggcctaccatcagacggacgatatcgtcattactcacatcgcttactatgccgctgcaaacgctgctgccgtctttcatcaccgtatagcggtcgcaaatacggcgaatttccgccaacttatggctgatatagacgatggccgtaccctctttacgcaactgattcatgatcagaaacagatagtccacctctttattggtgagactggaggtgggttcatccatgatgatgactttggcatcgagcatcagcgttttggcaatttctagcatctgcttgtggctgatagataaattcgccactttctcatctagatcaactttcaagcccacgcgtaataacatcatggcggcgcggacacgcatttctcgccagtcgataatattgacgccacagatttttttcgtcagatgacgaccaatatataaattttccagtacggttaattcatcaataacgctgagttcctgataaataatcccgataccgagttgtgccgctaatttatgatccagcttgttatagctaatgttattaatggtaatggtgcctttggtcggctcatgtattccggataaaactttcattagcgtggatttacccgcgccattttctcctagtaatgcatgtatttcaccaggataaaccgttaaattaacgctctttaatgcgtgaaccggaccaaaggacttgccgatccccgccatgcttatatatggcgtggccataaataacctctctgcacgaaatatcgtattattgcctgatggctacatttatcaggtctacgttcaggttattttgttggccggataagacacttcattagcatcatcatccggcatcattcagttttattgagtgaccaggatactatcgaccagtttaaattccggtgctttatccagcgggataaccttgccggatttctcagcgtcaaccatcagcttcagacccgttgcgccgatatccgccgggttctgggcaaccgtcgcggtcatttgtccggcttccaccattttgcgggcttccggaatgccatctgtaccgacgaccagcacttttcccgtttttccggcgtttgcgactgcctgagcaacacccattgccatcgtgtcattcgcgcaatagatcgctttaatattcggattacgttgcaacacgttagtggcgacatccagtgctttaatgcggtcccagtcggcaggctggctggcgacaagcttgatctggcttgcttttttgaaggcttcggtggcaccattacgacgcgcttcaccggaggcgttaccggctttaccctcaatgattgcgacttcaccaccttcagcgcccaatttgtcaataatgaagctcgcgcctttcgccccgacagcaacgttatcggtggtgacaaaagcttccacattgccgccagcttttttcagattatccatgtcgattttttcatcgagattaaccagataaatgccttttttccatgcgcgggcgacaggcatgaccagattcacactggataatggagcgaaggcgatacctttgtaatttttattactgagatcttcaaataactgcaattgagattgaaaatcgccttcactaggagaggcaaaaatatcaacgctgacgcccagtgtttttgcttcatcttcaatgccttttttcatatctacccaaaatgggttggagagggttttcaatacgacagcatattcggcggcagcaaaagcgctggtactcaacattaagcccacgagtgtgccgctgaaatatttcagatatttattcataataatgttctcacggtaaggggacaggtaactccgcgatggcggaattacctttttcttatttcagcgcgcctggactgaagaaatcaacaattgcgccggttttttgcatattaatattagcttgttcaatgttgagctgggcgacagagacaaaaaaagcgtccagcaaagttagttgtaatattcttgcgctggcattacgacctaataacggcgtttccggggctggactgcaaataatataatcggccagtttcgctatcggactatggtagctatgggttatacaaataatctttgccccgttcttttttgccagttctacggccgcttttacatcactggttcgcccggaatgggtcactaccagcacaacatctccttcctgtaacaagctagcggacatcatcatgatgtgagcatcaggataggcctgacagcgtacgccaatgcgcaagaacttgtgctgtacatcagcacagatagcattacttcctccggcaccgtacaaatcccgctgtctggcctgatagaaaaagcgggcggcacggtggatctcatcaacgttgacgatgctctgaccttccataatggtgcgtaaagtgatgttaaataccttattcaccacatcctgcggcgcttcatcaaaagccaactcggaaggcaatacctgttcactctgagaaaaataatcttccagcgcactgcgtaagttacgaaagccgctaaaccccagcagcttacttaccttaactatcatcgcttcagataccgccagagcttctgcgacatctttaattgcgggtgcacaactcaggttaccgggtttgagtaaccactccacgatgcggctttcattttctgtcattccttcctgcttcattcgcaggtaaggcgctaaccctataccgttcggaagcgcactatcaaactcactctggctcatcacgttctcttgtccttgaattgaagacgccactatatcaccacagcaagaacagaaaagatgctggcgacttcacaaaaaaataaaatttataaagtttattttattgtgaacaatggcgagtggcttaaaattttatttcatttaattagtttaaaaacatgatgttatttgtttttctggttttttagatgatagatgttgctggatggtgagtgtctttaacgctattgcgctgtcagatgtaactctgtaaaacagatcaggaaggcgtaattcatcgattttgggtgtttttaattcattaacatcacaaatgttttttgattgtgaagttttgcacggacggggaagatgaatgaaaaagattgcatttggctgtgatcatgtcggtttcattttaaaacatgaaatagtggcacatttagttgagcgtggcgttgaagtgattgataaaggaacctggagcagtgagcgtactgattatccacattacgccagtcaagtcgcactggctgttgctggcggagaggttgatggcgggattttgatttgtggtactggcgtcggtattagcatagcggcgaacaagtttgccggaattcgcgcggtcgtctgtagcgaaccttattccgcgcaacttagccggcagcataacgacaccaacgtgctggcttttggtagtcgagtggttggcctcgaactggcaaaaatgattgtggatgcgtggctgggcgcacagtacgaaggcggtcgtcatcaacaacgcgtggaggcgattacggcaatagagcagcggagaaattgagattcatccactacttgcatggatgagtaatgattaatgtggatagagtttctttttgaggttggctaatgaaacgctttccgctatttcttttattcaccctgctcacgctgtccaccgttccggcccaggccgatattatcgacgacaccattggcaatattcagcaggcgattaatgacgcttataaccctgaccgtgggcgagactatgaagatagccgcgacgacggctggcagcgtgaagtgagcgacgatcggcgcagacaatatgacgaccgccgccgccagtttgaagatcgccgcaggcagctggacgatcgccagcgccagcttgatcaggagcgtcggcaactggaggatgaagagcggagaatggaagatgagtatgggcgatgaggttgggtatggagcaggcatcgcccctcaccccaatggggagagggagaaaacgagcgcaatattcaatatcgagcacaatcggtcccctcgcccctctggggagagggttagggtgagggggccagcgcgcacattccctctcatcacgccaccccaatctccatcccatcaaaccccacctcaaacccactcggtagtgcgttttccatcagccacgcatcaaactggtggctgatatgggtcagaatcacccgtgggctgcggataacctgattcagcgcaagcacggtatttaaatcacagtgattacgcggtgcatccgcgcgcggcgggtgactgcaatccatcaccattacctgcggctgattattgcgtaaaaatttcagcgttttttccggcaagcctgcggtgtcagacagccacgccacccggctgtgtgccgtttccagcagataaccgaaggtcagtttactgtggttgagcggcaggggcgtgacctgtaacccctgcaaatcaaacaccacaaacggttccaccgtgtggctgaaatcaagcaggcccggatgtttaaacagatcgtcgcagccctgttcatccggcgggccgtaaaccgggatcggatcgccaacgccccagcgcagcggaaacagcccctggacgtgatccatatgataatgcgtcagcaaaaactgctggaagcttccggggctccagcgatcggcgagatcgtgcagcccggcgtcgatcagggtgattgcgtcgttaaacttcactacgccgctgcacggttggcggcgatactgcgggctgcgccgcgctctggcgcaggccgcacactcgcagccccatgccggaacgccctgtgcgccgccggtgccggtgagcgtgagggtcaggctcatgttacagcgccttggtgaagcggaagtggctctgctcgtagccttcgcgcagatagaaacggtgcgcgtcgtggcgcttcacgttggtgctaagttcggtcatttcggccccggcctggcgggcttcttcttctgcccacgccagtaacttactgccgacgttcagaccgcgcgcctgcggcattaccaccaactcctgaatttcgccgatccagttgacatgatgcagatgaaactgcaaatgcaggccgatcatgccgacaacttcgccatcaagcagcgccagatggtagcgcatgtttgggtcgcgcagattggcgttaaaacccacgcgaaacgcgtggtggtcaaactccgcctgttttagctcacaaatcagcgcgtaaaccgcgtcggtgtcgtactgcgtggccgggcgaagctcacaagcaggcatggtgtttctccttctgatggatcagcgtcagcagcgtgtcgacgctctggcgcaggctgccgtcattgttgagcgtatggcaatcctgtggagtatagcgggcggcgcgcgccaggcgggcgttaatttcactggcgttttcacggccacggttttccaggcgctggcggaggatctccgggctaacctgtaaacagacgggcagcagcgcgctttgatagcgcgcccgcgcctgcggcagatgggcgcgactgccgttgaccagcacgtcgaatccggcgtgcagccagagatcaatctcgacgccgacgccataatacagaccgttagcgtgccagcttaaggccaacagattttgccccgcgcgggtaaaaaactcctgctcgctcagggcgatatggttttcacttccggcgctggcatcgcgcgtgatgtagcgatgcgccaccagtaactgagtttgttcccgcaggcggagttccgccagcaggctgtctttcccggagccggacggccccattaaccaaatcagttttcccatcatcagaacacccttttaccctgacgccagacgtggtcgatatgaatatgattgtccttgcgatgcgccagcaccaggtcggcgcgtttgccctcgccaatcaccccgcgatcctggagattaagcgcctgcgctggatttttagtcaccagcttcaccgcctgcggcagcgtaaagcggttgctctggtcatcggcgacgcgaaatgccgcatcgagcaggctggcggggtagtagtcggaagagaggatatccagcaggccaagctgcgccagttcactggccgccacgttgccggagtggctgccgccgcgcacaatattcggcgcgcccatcagcacgttcatgccatgcttgcggctggcttccgccgcttcgaacgtggtgggaaattcggcgatcacgctgccaagctggtgagattcagcaacgtgggcgtgggtggcgtcatcgtggctggcaagcgcaatttttcgcgcgcggcacagggcggcgatggattcgcgattcggctggctccagcgtgcggcgagcgccagttgctcttcttcgtactgctgcatctgcgcatcagtgagggagtatttgccctgataatattcgcgatacttctcgcggttggcgaactggcgctggcccgggctgtggtccatcaggctcaccagcgtcaccggctcgcgctgcaccagtttttcaaacagcggcagcgtggtgtgatgcggcagttcgcagcgcagatgcagacggtgctcggcgcggttgacgccgcgtttctgcgtctcttcgatggcgttgatcatcttctccagattctccagccgatcgccgccgtcgcgcacgtcgccaattgccacggcatccagtacggtggtgatgccgctcgccaccatcagcgcgtcgtggctgctcatcgcgctgtgggcaggccagtcaactttcgggcgcggggtgaagaatttatccagattatcggtatgcagctcaatcagccccggcagcagccagccgccttcgccgtccatcgcctccggcaggcggctctggctttcggcaaaggcgcggatttcgccgttctgcacctccaggctaccgcttaccacctcgttttccagcaccagcttaacgttattgataatcatgaagaggctcccattgggtgttagctcaactagaggctcccattgggtgcaggcggtcggcgacgtcattacgtacagcttcgtcatggaagatgcctacgatggctgcgccacgggttttggcttcgcgaatcagttccaccaccgcggcgctgtttttggcgtccaggctggcggtaggttcgtcaagcagcagaatggggtagtcgacgataaagccgcgggcgatgttgacgcgctgctgttcgccaccggaaaatgtgcttggtgccaggtgccacaggcgttccggcacgttcaggcgggtgagaagacgcgcggctttagcggcgcaggcttcacgcggaacgccggtatcgagcagcggctgcatcaccacttccagtgcactgatacgcgggatgacgcgcagaaactggctcacccagccgacggtggttttgcggatttccaccactttgcgcgctggcgcggtgaccaggtctacccactcgtcaccgtgtttgatctggatttgaccttcgtcgggcagatagttggcgtacaggctgcgtagcagagtacttttgccgctgccggaatggccgtggagcaccacgcattcgcccgcgttgacggtgaggctggcgcgattgaggacgggcaggcgcacgccgttttgctggtgcaggatgaaggttttactgacgttttgtacgttaatcatttttcgcctcgtggttcgggtgtcggatgcgacgctgacgcgtcttatccgacctacggggagcgcatttgtaggccggataaggcgtttacgccgcatccggcaccggctcaattctgcaaaacgctactcaccagcagctgtgtatacggatgatgcgggtcgtcgagcacgcggtcggttaacccactctccaccacttgcccctgcttcatcaccagcaaacggtccgccagcaggcgggcgacgcctaaatcatgggtgacaatcaccaccgcgaggttcagctccaccaccaggccgcgcagcaggtcgagcaggcgggcctgcacgctcacatccagcccgccggtcggttcatccataaacaccagcttcggatgcgtcaccaggttgcgggcaatctgcaaacgctgctgcataccgccggaaaaggtggtcggcaggtcgtcgatccggttggcgggaatctccacctcttccagccacttctgcgcggtggcacgaatatcgccgtaatgacgtgccccggtcgccatcagccgctcgccgatattgccgcctgcgctcacctggcggcgcaggccgtcgagtggatgctgatgcaccacgccccattcggtacgcagcaggcgacggcggtcggcctcgctcattgcatacaggctacggttctcgtagtgaatttccccctgctgcggcgtcaggcgcgcggagatgctcttcagcagcgtggtcttcccggagccggattccccgacaatgcccagcacttcccccggccataaatcaaaagagacatcgctaaagcctttgcccggcgcgtaaaggtgggtcaggttattgacgctaagtaacggttgattcattggttttttgcctcgctctgttggcggcaataatcggtatcggagcagacaaacatgcggtttccggcgtcatccagcaccacttcatcaagatagctgtgggtgcttccgcagatggcgcatggctcatcccactgctgaacggtgaacgggtgatcgtcgaaatcgagactttccacgcgggtaaacggcggcaccgcatagatgcgcttctcgcgccccgcgccgaacagttgcagggcgggcatcatgtccatttttgggttatcgaatttcgggatcgggctcgggtccatcacgtagcgcccatttaccttcaccggataggcgtaggtggtggcgatatgaccgaagcgggcgatatcttcatacagtttcacctgcatcacgccgtactcttccagcgcgtgcatggtgcgggtttccgtttcgcgcggctcgataaagcgcagcggctcggggattggcacctggaagataattatctgatcttcggtcagcggcgtttcggggatgcggtgacgcgtctggataaccgtcgcatcgtccgtacgttccgtggtgtttaccccggtcacgcgcttgaagaagttgcgaatgctcacggcgttggtggtgtcatccgcgccctggtcaatcaccttcagcacgtcgctttcgccaatcacgctggcggtaagctgaatgccgccggttccccagccgtacggcatcggcatctcgcgcccgccaaacggcacctgataaccggggatcgccaccgcttttaagatggcgcggcggatcatgcgtttggtctgctcgtcgaggtaggcaaagttgtagccgctcagattagccatggttctgctcctgttgcagacgtttgagtagctccagttcggcctggaaatcgacgtagtgggggagtttgaggtgactgacaaagcctgcggcttcgacgttgtcggcatgtgccagcacgaactcttcatcctgcgccgggcctgtcgcgtgctcgccgtactccggggcttgcagagcgcggtcgaccagcgccatcgccatcgctttgcgctcgctcatgccgaacaccagcccgtagccgcgcgtgaagtgcggcggctcacccggcgggtcgataaaaccgttaaccatttcacactcagtcatcagcagttcgccgacgttcaccgcaaatcccagctcttccggcacaatgctcacgtcgatatagccgctgcggatctcgcctgcgaacgggtgattgcgcccgtaaccgcgttgggtggagtaggccagcgccagcaaatagccttcgtcgccgcgcatcaactgctgcaaacgggaggagcgactgcaggggtaaaccggcggcgtgcgggtgatgtcatccggctgtgcgccgctatcctcttcaaacttcgccagcccctgacgcgccagcaggctgaaaacgtgcgggctcggctgctgttcgctgtcggcggtggtcagcgtcggcgcttcgccgtttgccagcagggtaaaatcgagcaggcgatgggtgtagtcgtaggttgggccaagcagctggccgccgggaatgtctttataaacggcggagatacggcgttcgagacgcatcccggtggtgtcgagcggctcgcttaccgccagcttcgccaacgtggtgcggtaggcgcgcagcaggaaaatcgcttcaacgttatcgccgctggcctgtttcagcgccagcgccgccagttcgcggtcggcaatgccgccttcggtcatcacgcgatctaccgcgaggttaagctgctgttcaatctgggcgacgctcagttcgggcaaatcggtatcgcctcggcgtcggctctcttgcagggcgtgggcggcgtcgatcgccttctcgccccctttcacggcaacgtacatcagcacacctccacatgagtggttcgcggaatagccagcaggcgctcgccacaggtcaggatcaggtcgatgccgagcgggaacggatgcgggcgctcggtgagttcgtgcagaatgcactccggcagctgcggagcgatcattcgttcttcggcaatacccgcaccagtaaggcgcaacatgcgtccgccgctcaggctggcgacctgtaaaatcagcgtcgcacccgcttccggcgcaacggcggtgccggtggaaagggcgttgagctgttcgctggaaatcgcctcatccgtcaccgcgaaggtcgcctgttccggctggctgaccagcggcgcgttggtatgaaaacgcaggctctggttgacgatatcgttatttaatggggtagaaagccacaccggcgtgtcgttatcggccagcgtcagcagcacgctggtggtggcgatattcagcggttgccagccgcgtttgagctgatgcagggcgacaatcacgcccggctcgctcatggcctttaacaggcgacgaaaactgtgctgggcatcctgcacgggaagcataaaagcggtttccagggtcatgcgttgtctccgcgaaccatcgtaaagaagtcgacccggctggcgttcacttcggcctggcgtgcggcaatgcgtgccatacggtcagcgtccagcggggcaataagggtttcacttaagttttgaaagtggcgagattgctgcatcagcgcgtcaatcagcgcgcagcgttcggcgtgctgtttatcacgcccctgcacccagctgtagccgagcgtgccgtcagtcaggcgcacggcggcgcgggtcagcgtggcgtcgccggcaaaaaaacgttcgccggtgccgcccatccgcgcctgaatctgtaccaggccagtttcagcggcgcggatcacctcatagtcggcggtgatgtttagcgcgttcaggcgtgctgccagttcagccggttggctgtgcgccagcacggacatccagtgctggcgggtcgcggtatctgcgtgcattcagtgctccatagtgaattcaatcatgtcggcgcgcgtcaggctgacggagtactccgccgggctgctttcaccgtcacggtggttaagggtgcgcacgcacagcagcgggctcatattcgggatttcaagacgctggcactctttggcctgggcgcggcgggcgctgatccgcgtctggctgcggcgcagcgcaattccggtttgctcgcgcagaaaatcgtgcaggctgccgctgtcgaagcgttgcagcgtcggccagagggtgaggtccgcgaagtagtggtcgattaaacagagcgcgacgccgttgacacgacgcagggtgcgcaggtggatgacgttctccccctcggtaatccccagtgcgtcagcgacgtggccggacgcggggcgcaatacgctaagcagtttttcgctggtgggatggctgccctgatccagcagattctggctaaaacgcgcctgggcgttgagcgggtaatcgaacgggcgcatcagcaccagcacgccgacgccctgacggcgctgtacccagcctttttccaccagttggtcgatggcgcggcgcagggtgtggcgattcacctcaaagcgcgctgccagttgctgctcggcgggaagatagtcgccgcagcggtagtgttgacgaagctcctgctcaagttttgcggctatctcttgatagcgtgttgggtagctggtcggatgtgtagacaagtgcatagatatcaatgcctcgcttatcagataaagtgcttacgcaaccgttgagagaggaaatccagcaggctgaccgtgacgatgataagcaccatcagggcgcaggtttgttggaactggaaaccgcgaatcgcttcccacagggtgacgccgatcccgcctgcgccgaccatgccgacgacggtcgccgagcggacgttggattcgaagcgatagagggagtaggagatcagcagtggcatcacctgtggcagcacgccgtagaggatctcttcgagcttgttggcaccggtggcgcgaatgccttccaccgggccgggctcaatcgcttccaccgcttcggaaagcagcttggagagcacgccggtggtgtggataaacagcgccagcacgccagcacgccagcgaacgggccgaggccgacggcgaccacgaacagcatggcgaagaccatttcgttaatggcgcggcaggcgtccatcaggcggcgaacgggctggtaaacccaccacggcaccaggttttcggcgctcatcaggccaaaggggatggagagaaccaccgccagcgcggtgccccagacggcgatttgcagcgtgacggccatttcggtgaggtaatcctgccactggctgaaatcgggcgggaagaagtcggcggcgaacgtcgccatgttgccgccgtctttgatcagcgtaagcggggccatttccgcgccctgccacgagacgaccaacacggcgagtacaacggcccagctcagaagcgagaaccagctgcgcttgggtggggcgatggtgatggtttgcatgtttggctccggtctgtaggccggataaggtgcttgcaccgcatccggcatcaacgcctgcacattgtcggatgcgacgccggggcgtcttatccgacctacgatttactgcaccgctttactcacgctactcatcgcgcttagcgcgttgttcaggcggtccaggtcatccagctgcgcctgaatctcggtggtttttgccagcttgtcctgctcattcagtcctttattgcttttcacgccctgcatctctttaaacagcgcgagctggcgaatcggcaccagttgcaggtcgctggaagcgcggaatggcgcccagcccaggcgttccagcaccgctttttcttccggcgttttgccgtagttcataaagaagtcgtagatcttgtctttggtggtttcggaaagattcttgcgccagacgatcggatcgcctgggatcagcgggctcttccagatcaccttcagttctttcagcttctctggcgcggaggttttcagcttgtcgaggttttcggtgttgttggtggcaacatccacctgcttgttggcgacggccagcgcgttggtttcatgcccggcgttgacggtgcgcttgaagtcgctggcggagatattgtttttggcgaagacgtagtagccggggacgaggaagccagaggtggagttaggatcgccattgccaaaggtgagatctttccgcttcgccagcagatcgttcaggttgttgatcggactgtctttgttgacgatcaacacgctccagtaacccgggcttccatccgccgcgaccgtctgggcgaagacctggccattggcgcgatccaccgcttccatcgcgctcagattgccgtaccaggcgatatccactttattgaagcgcatcccctggataatgcccgcgtagtccggggcaaagaaggcgttgaccttcacgcccagcttcttctccatatcctgcaagaacggcgtccattgcggtttcaggttttgctgactttccgtactaataatgccgaaattcaacgccttttcctgctcttcggcgtgcgccgggcttaacagggtgctgaggctgaacatgctggtgaaggccaggctggcaattatcttagcgttcattcgttttcctcaatgatggggatgtcaggcagctttcgcgttctcttcgacgcggttaatgctgcggtagagatggtcaaaacgttcgttatcaaactgttggctgctgccgtcgtagaagacgtgcccctggcgcagggcgacgatgcgttcgcagtagcgcagggcgtaatccacctgatgcagcgtgacgaccacggtgatgccgtcgttctggttgatgtcgcgcagggtgtccatcacgatgcgcgcactttctgggtccaggctggcgatgggttcatcggccagaatcactttcgcctgctgcatcagcgcacgggcaatcgccacacgttgctgctggccgccggagagggtggaaacgcgctgatgggcaaaatgcaccatgccaacgcgggtcagcgcctgtaacgcgcgctgtttctgctcgccggtgaaccagctaaaacaggtgcgccagaacggcgtgctgccgagcgcgccaatcagcacgttctccagtacgctcaggcggttcaccaggttgaattgttggaatatgtagccggtatgggcgcggcttttgcggatatcgcgggccaggcggccttcgcgctggactgtgcggcccagcagctcgatatggctaccgacagatttatcgccggtaatcaaaccgcttaagtgacgtaaaagggtggattttccggaaccgctcggcccaagcagagccaccatttcaccgtgatgaatgttcagatcaaccgcatgcagcgcctgatgctgattgaaggttttggcgagcttctcgacacggataatcgtttgcatgatgcagcctccctaaaaaagtggctccatcgtggcggattattgtgacgatttggttaattaaaagtgactaacagatgaagagttaacgggaattcgatgacagtgcgggagggcgggcctcccggcgggttattgcgttggttgttgtttgacgacattaatcatccacggtacgccaaatttatcggtgactttgccaaagccatgcgcccagaaagtttcctgccaggccatttcgatttttccgttagcggcaagattgtcaaaccagcgttttccttcttcgacctgttggctatcgagcaccagcgtaaagccggagtagctggcttttccactcggcatggcatcgctcatcatgatgtcgcttccggcaatgcgcacattggcgtgggcgatggcggtatcgggaaattgcattccggaagggcagttctcggcgctgtcctgcgcactttttggcatttcgccgaagctgattttatagagcagttccgcgcccaacgtacgttgataataggcaatcgcgtcggaacagttaccggcaaaagagaggtagggacttaacggcatgatggtgacctcagttaagagaagccagttaagtgtagttcgaaatttatacagatgagaggcggcctgataagacgcgcgagcgtcgcatcaggcagtcggcactgttgccggatgcggcgtaaacgccttatccggcctacggagggtgcgggaatttgtaggcctgataagacgcgcaagcgtcgcatcaggcagtcggcaccattgccggatgcggcgtaaacgccttatccggcctacggagggtgcgggaatttgtaggcctgataagacgcgcaagcgtcgcatcaggcagtcggcaccgttgccggatgcggcgtaaacgccttatccggcctacggatggtgcgggaatttgtaggcctgataagacgcgcaagcgtcgcatcaggcagttggcactgttgccggatgcggcgtaaacgccttatccggcctacggagggtgcgggaatttgtaggcctgataagacgcgcaagcgtcgcatcaggcagtcggcaccgttgccggatgcggcgtaaacgccttatccggcctacggagggtgcgggaatttgtaggcctgataagacgcgcaagcgtcgcatcaggcatctggcaccgttgccggatgcggcgcgagcgccttatccggcttaccgatcacaatacaatcagttctttttcacaaactcagatttcagtttcatcggaccaaaaccgtcgattttgcaatcgatgttatggtcgccttcaaccaggcggatgtttttcactttggtgccaattttcagcatgctagagctacctttcaccttcagatctttaatgatggtaacgctgtcgccgtcagccagcagattgccgttagcatctttaacgatcagctcgtcgctttcctgtgcaggttctgcgtcgttccattcgtaggcacattccgggcagatgtacatgccgttatcttcgtaggtgtattcggagttgcattttgggcagtgtggtaaactcatgtggatttcctcaaaagtcagcagggcaaaagcgccaaaaaacggcagattgccgaaaaaggccgcaattatacacaaaatccctgagtttgtcgggggtactgctgattttagacgacgatcgttttcatttgaaaggaaacgcaaaaagaaaataatctttttgcctctatttattatttaagataatgttaatgctctacttgttctttttttaattcacatgatatttttatctttctgacgttttaaacgtatcagaagacgttatttattctgataaaaaacaacacactaaatataaaattatttcttgcagtaattataaaagccgaaaacagaactcaaaaacaatctggctaaataaaataacaaaatttgctttaaggaagaattttctatgtacacacagaccctgtatgagttaagtcaggaggctgaacgcctgttacagctttctcgccaacagttgcagttactggaaaaaatgcctctctctgtacccggagacgacgcgccacaactggctttaccctggagtcagcctaatatcgccgaacgtcacgcgatgctgaataatgagttgcgtaaaatttcccgactggaaatggtgcttgcaattgtcggtaccatgaaagcagggaaaagtaccaccattaatgccattgttggtacggaggttctgcctaatcgtaatcgcccaatgactgcgctgccgacgcttattcgccatacgcccgggcaaaaggaaccggtactgcattttagtcatgtcgcgccaatcgattgtttaattcaacaattacaacagcgcctgcgtgattgcgatattaagcatctgaccgatgtgctggaaatagataaagatatgcgtgcgcttatgcagcggatcgaaaatggcgtcgctttcgaaaaatattatctgggtgcccagcctatttttcattgtctgaaaagtttgaatgatttagtgcgactggcgaaggcgctggacgtcgattttcctttttctgcttacgccgccattgagcatattcccgtgattgaagtggagtttgtccatctagcggggctggagagttatcccggtcagttgacgttactggatacccccgggccaaatgaagccgggcaaccgcatctgcaaaaaatgcttaaccagcagctggcacgcgccagcgcggtactggcggtgctggattatacgcaactgaaaagcatctccgatgaagaggtccgtgaggcgattttggcggtggggcaaagcgtgccgctgtacgtgctggtcaataagttcgatcaacaggatcgtaacagtgacgacgccgaccaggtgcgggcactgatttccgggacgctgatgaaaggctgtattacgccacagcagatatttccggtgagcagcatgtggggctacctggcgaatcgggcgcgctatgagttagccaacaacggtaagttaccaccgccagagcaacaacgctgggtggaagattttgcccatgccgcgcttggcaggcgctggcgtcatgccgatctggcggacctcgaacatattcgtcatgctgccgatcagttgtgggaagatagcctgttcgcccagccaattcaggcgttgcttcatgccgcttacgctaacgccagcttgtatgctctgcgatctgccgcgcataaactgttgaattacgcgcagcaggcgcgggaatacctggattttcgtgcgcacgggttaaacgtcgcttgtgaacaattgcggcaaaatatccaccagatcgaagaaagtttgcagctattgcaactcaatcaggcgcaggtgagcggcgagattaaacatgaaatcgagctggccctgacctccgccaaccactttctgcgtcaacagcaagatgcgctgaaggtgcagttagccgccttgtttcaggatgatagcgagccgttaagcgagattcgtacccgctgtgagacactgttacagacggcgcagaacaccatcagtcgcgactttacgctgcgttttgccgagcttgaatccaccctttgccgggtgttaaccgatgttattcgccccattgagcaacaagtcaaaatggaattgagcgagagtgggtttcgtcctgggtttcattttcctgtttttcacggcgtagttccccacttcaacactcgccagctgttcagtgaagtcattagccgccaggaagcaacggacgagcagagcacgcgtttaggcgttgtgcgtgagacttttagccgctggttgaatcagcccgactggggacggggaaatgagaaaagtccgacagaaacggttgattacagtgtgttgcaacgagcattaagcgcagaagtcgatctctattgccaacaaatggctaaagttctggcagagcaggtcgatgaatctgttacggcaggcatgaatacttttttcgctgagttcgctagttgtttgacggaattacagacgcgtttacgcgaaagtctggctctgcgtcaacaaaatgaaagcgtggtcaggctgatgcagcagcaattgcagcagactgtgatgactcacggctggatttacaccgacgcccagctgttacgcgatgatattcaaacacttttcacggcagaacgatattgaccaagacgttacttgacggccccggtcgcgtgctggagagcgtttatccccgctttttagtggatctggcgcagggtgatgatgcccgccttccacaagcccatcagcagcagtttcgtgaacgactgatgcaggaacttcttagccgtgtgcagcttcagacatggacgaacggcggcatgttaaatgcgccgcttagcctgcgtctgacattggtggaaaaactggcgagcatgctggatcccggtcatctggcactgacgcagatcgcgcagcatctggcgctgctgcaaaaaatggatcaccgccagcactctgctttcccggagctcccccagcaaattgccgccttgtatgagtggtttagtgcccgttgtcgctggaaggaaaaggcgttaacgcaacgaggcctactggtgcaggcaggtgatcagagcgagcaaatttttacccgctggcgtgctggggcgtataacgcctggagcttgcctgggcgctgttttatcgttctggaggagttgcgctggggggcatttggcgatgcctgccgtctgggaagcccgcaagcggtggcgttgttgctgggtgatttgctcgagaaagcgacacaacatctggcagagagtatcaatgcggcaccgaccacgcgtcactattaccatcagtggtttgcctctagcaccgttccgacgggcggggagcatgctgattttttaagttggctgggaaagtggaccacggcagataaacaacccgtttgctggagtgtgacccaacgctggcaaactgtcgcgctggggatgccacgactctgtagtgcgcagcgtctggcgggggcaatgctcgaggaaatcttctctgtaaatttggcgtaaataatcagttacatcaatgagtcctaaacgaaatccatgtgtgaagttgatcacaaatttaaacactggtagggtaaaaaggtcattaactgcccaattcaggcgtcaactggtttgattgtacattccttaaccggagggtgtaagcaaacccgctacgcttgttacagagattgcatcctgcaattcccgctccccttttgcggccgtcgcgctgatttttctggcgtttgcggaaatgggccaactctgcgaggaaagctatgctgaaaaggaaaaaagtaaaaccgattacccttcgtgatgtcaccattattgatgacggtaaactgcgtaaagccattaccgcagcaagtctgggtaatgcaatggaatggttcgattttggtgtttatggttttgttgcttacgcattaggtaaagtttttttcccgggggctgaccccagcgtgcagatggttgctgcacttgccactttctccgttccctttctgattcgaccgcttggcggactcttctttggtatgttgggcgataaatatggtcgccagaagatcctcgctatcactattgtgattatgagcatcagtacgttctgtattggcttaataccgtcctacgacacgattggtatttgggcaccgattctgctgttgatctgtaagatggcacaaggtttcagcgtcggcggtgaatataccggggcgagcatatttgttgcggaatactcccctgaccgtaaacgtggctttatgggcagctggctggacttcggttctattgccgggtttgtgctgggtgcgggcgtggtggtgttaattagcaccattgtcggcgaagcgaacttcctcgattggggctggcgtattccgttctttatcgctctgccgttagggattatcgggctttacctgcgccatgcgctggaagagactccggcgttccagcagcatgtcgataaactggaacagggcgaccgtgaaggtttgcaggatggcccgaaagtcagctttaaagagattgccactaaatactggcgcagcctgttgacatgtattggtctggtaattgccaccaacgtgacttactacatgttgctgacctatatgccgagttatttgagccataacctgcattactccgaagaccacggggtgctgattattatcgccattatgatcggtatgctgtttgtccagccggtgatgggcttgctgagtgaccgttttggccgtcgtccgtttgtgctacttggtagtgttgccctgtttgtgttggcgatcccggcgtttattctgattaacagtaacgtcatcggcctgatttttgccgggttactgatgctggcggtgatccttaactgctttacgggcgttatggcttctaccttgccagcgatgttcccgacgcatatccgttacagcgcgctggcggcggcatttaatattagcgtgctggttgccggtctgacgccaacgctggcggcctggctggtcgaaagcagccagaatctgatgatgcctgcctattacctgatggtagtggcggtggttggtttaatcaccggcgtaaccatgaaagagacggcaaatcgtccgttgaaaggtgcgacaccggcggcgagtgatatacaggaagcgaaggaaattctcgtcgagcattacgataatatcgagcagaaaatcgatgatattgaccacgagattgccgatttgcaggcgaaacgtacccgcctggtgcagcaacatccgcgaattgatgaataagctgaaacggatggcctgatgtgacgctgtcttatcaggccaattgaactcttaaggttcacttaatctctgacgcgcatactctcctccaggttaacggaggagagtgcaatgaaaaaccgtgtttatgaaagtttaactaccgtgttcagcgtgctggtggtcagcagctttctttatatctggtttgccacgtactgatctttcttcagccgtacccaggcccgcgtgccggaagtctcttgccggttttgcaggaaaaactgcccgtgatgcaactgtgtaatgcggctgacaatacttaaccccagaccaatcccgccataacggctgtccatacgtacaaacgctttactcaactccccgcatttactctcatcaatacctggtccttcatcttcaactgccatgaccgctccgtcatcttcttgcagcttaatcataatgttgctgccttgcgggctgtaacgatgggcgttttctaccaggtttcgcaataacatccgcagcagggttgcatcaccctgaacggtgatgtcggcggcgctctctggcaatagcagggtttgctgtcgctggtcgagcatggtactgagttcgtcatagctggggagaatgacatcttccagcagttttacatgttgataattaccggaagaaaaactctgtccggcacgcgccagttgcagcagctgggagacgctctccatcatctgatcaagccgtgccactaacggtgctacatcaatgtgatgcgttttcgccagcagttccagatgcaaacgcacccccgccagtggcgttcgcagttcgtgcgcgacgtcagcggtaaacaacctttcgttatccagcgtgctggtcaggcgactgaccagatcgtttaacgcgctaaccaccgcttcgatttcgagggtggcgctgtgaatggcaatgggcgttaagttgtcggcggtgcgcgcttccagctctttttgcagctccgccagcgggcgggtgatgcggcgtaccgcctgatagcagataaatagcgtcaggctgaccataaagacgccggggacaatcaggctggcgaccgcctcgcggatctcacgcatgatgtggcgatcgttgttgcgattgtcgcgtagcgcctgctcaaacagctgaatctgctcggtactttcatgccatagccagaagacgctgatcagctcaaacaccaacaaaatggccccgatggtcaatatcagccgttggcgcaggcttattggtcggcgcagaaaatgcatcagattcaattagttttcctcattcgcgaccagcatatagccaaagccgcgcacggtgcggatacgggctttgcccactttgtcgcgcagattgtggatatgcacttccagggtgttggtgctgggttcattgtcccagttatagatgtcgttgtagagaatttcccgatgcaccggactgcctgctttgagcattaaccgactcagcagagcatattctttgggcgtcagaatcaactcttcaccgcccatccatacctgacggcgacccatgttcagcgtcagattgccaacaatcagctcactttcgccctgattattatggcgtcgtagcagggcgcggatacgggcatgtaactcttccagcgcaaaaggcttcaccagatagtcgtcggcaccgacatccagcccggcgattttgtcggtcagcgtatcgcgagcggtgaggatcagtaccggcagggtatattttttctgccggatacgggcgagaaaatgcagtccatcttcgtcgggtaaccctaaatccagtaccaccaggctgtaatgacctgcctcaaggctttgttccgccatccgcgcggttgtcacgctatcgcacgcgtagccttcggtttgcgccgccagaatcagtccctgcaataacagcgtatcgtcttcaacaatcagaattttcattcactcactctcctgcaagtttgcagaatatcatccgcagcctggtaatacttcgtctcaacgccagttaatcccaatagcgtggagaataaattgtcttgactatagtgttgcgtttgcgcctgtttttgcaggcagttctggtcaacctgataccgtttttgataatcctcgctcagccacagcagcatcggcacctgtttttggctatccggggcgatggcataaggcagaccgtgcagatagatgccattttcacctaagctttcaccgtggtcagaaagataaaccaggctggtggtaaatttatcctgatgttctttcagcagattaatcgctttatcaacaatatagtcgacgtaaaccagcgtgttgtcgtaagtgttcaccagttgctctttggtacaggtctggatctcattggtgtcgcaggttggggtaaatttcctgaactgaggcggatagcggttgtaataggtcggaccgtggctgccgatggtgtgtaagacaatcacgccatcaccttgcaggttattgatgtactcttcaagcccgtggaacagcacttcgtcatagcattcgccgttgatgcactgatcaggtagattcagcgcggtgacgttctggtgaggcacgcggtcgcaggcacctttacagccgccatcgttgtcattccacagcacgttgatgcccgctcgctgaatgatatccagcacgccttcctggtgctgtgccagctcttctttgtagtgctcacgcggcatatcgctgaacatgcacggtacactaactgccgttgccgtgccgcaagatgcggtattagggaaatagaccacgttatctttcgccagccgcgggttagtttcacgcgggtagccgttgagggagaagttctccgcccggctggtttcgccgacaatcaggatggtcaaatttttacgtttttcgttctgcattaacgggttgcggtgcgcgtcttcaccaattcgcaccagcggcagatttgccagtcgctgatgggagtaccaactccagctggcaacaatgctgttagaggggcttaaggatttcaccagctctttgttattgcggaacaagctggcgtagtctttataaaacagtgcggcgaccagcaaaatcagtagtacagaaaccagaatattggctccacggaaaagaacactgcgcagacggctggtggcaggtttgatttttatccagcaggcaatcagcgcagcaagcacgccgctgaatcccagcgttaataacatttgcggtgtcatcagcgcataactttctgccggagtggtatcaataatattggcaatcatgctgcggtcgatgacgatgccgtaagtcattatgaaatattgtgcagccgcgccaaccagaataaacaggcaggccagtggtcgattaagccataagaaagagcttagtgtcaggacaatattaatcacgctgaaagcgacgaccggcatgctcaagaaaaccagtacgttatgcaggctatccagcggcagcgcctgcaacacctgtttaaaaaaggcaatattcaggcagatagagatataaaaagcggccaacaatagccaggcgagtaaattcaaagagggtctttttagtaggcgcttcaacatcacggtgtttccatcgaacaaagtgcgcatatgctcgcaaagcaaaattaagccaaccttaagttcttaaggttggcttttatgtttgctggattaaggggaattaatctttgcttattggtgcatctaagggatacgggtttttatgtagccggttgtaattcagcgcatacatggcggtgatgaccatcagggtgacaaaactccacataacctctttcgctccggaccccaccacggcccagatgcagtagaggaaggcaatggtagtaactgccagatatgccgggcgtgctttaccaaagtgaccgtgtccgagcagcagtaacgccgcacaggtgtaaagatatggcaccagtgtaaagatgacgctgacggaagaaaccagaccgaactctttggtcgcgtttggactaatgctgctgagctggaagatggtcatcaaaataccgacgataatcagccccgccactggcgtacccgctttatttacacgggcaaaaatcggtgggaacagtccgtcatcggcagcggctttcgccgtttgacccgccagcaacgtccagccgcccagactacctaagcaacccgcagctgcgcagaaggaaacaatggccccggcggtgtcacccaacgccatccgtgcggcatcaccgaatgggctagcagaaacgcgcagtgcggcattagggatcatccccataatcgcggtggtagaaagtacatagcaaacggcggcaatcaataccccaccaatggtggcgatagggacattgcgtttcgggtttttcaccacacctgcggcaacggaggcactttccacaccgatgaagctccacagcgtaacgttaagggtactttgaattgcaccgaaggtgcccaggccgctgacgttccatgccgccatataggtttcaccacggaaccagaaccagccaaatacggcaatcccgacgatggggatcagcgccagcacggtggcaactgcctgcacacgggtgatcattttcggaccgacaatgttcagcaggacgaagatccacagcaccacgacgcaggtgatggttaataccaatggatctttcagaatcgggaagaagtaacttaaatatcctacgccaatgaccaccatggcgatattgccgatccagcaggccagccagtagaggacgttggtttgataaccgagaaacgggccaaagcagcggcgggcgtaagcgtaagaaccaccaggacttgggtcgaggaagctcattttggcgtataccatgctgagccccagtgcaccgataatcgtcaccaaccatccataaatggcaatcccgccagtagaggccaggtttgcaggtaacagaaaaacaccactccccataatattcccgctcaccatcagggtgacggggattaagcccactttgtgagcatcagcatcgctagacataattaaactcctgcgaaggcgagcttcgtgacaataaattacgtcatatcatacgcctgcattcgatagttgaattattatcgaccgggttatcgctgatgccgttattaatatagctcttcgttaaggttaaaaatcaggcgacagtgcgttctctgtgctgactaacataatgcagcggcgtcataccgtagaagtctttaaagacagaaataaagtagctcgtactgttgtagccgcaggactgacttacctgagagatatttttaccgtccatcattaattcatttacggcataacgcatgcggcaggtggtgattatttggctataactggtgttttcgcttttcaactttttctttaacagacttgggctaagacataaacaactggctaccatactaagattccagtctttgtgaatatcgctttcaataatttgataaacgctgtcacttacacaattacgtaacatatacatcattaaactaacgaattttttactgtcgagaaaacgggatagcaccgtgaataataatgcgcgtgttcgttccttttcactctcagtttctgcgggcatcatgctgtgttgcgcggcaacgcgaaagacgtctggcgtcaggcatggcagggtgagtatgggcgtagcgctacgttgccatactggtatttggctgagatctttattcagaaaccggaggtaatctttgatgatgtcgtgactaatatgagcaaccaaagtgttgttaagagaggagacgtcgataatattattttcacaatttaataacgccatatggttagctttaaggctaataggttctttcccattcacccttatccagacatctttttcagtcaataaaacaatacaaggttggtcgctgcaaatcctcatacatgtactcctgagtgcgaataaaagaccagttctcgctaaagcaaagcgataccgggaaatggttatataattgtatgatgaatataaacatgcataaaaataacgagttttactaatagtacaaatttttatagtaatttctcatgtacatatttttttacaggataaataacaggcaaaaaaaagcgcggggtggggccgcgcaaaaagtatgacatttttgtttgcagcaatttttatgaaaacgttgccatactcaaaaggcctaaggccaggcggcgtaatgttatttaaacaattacgccttcagcggaatagtggttacgctttcacgcacataacgtggtaaataccgtcaataatttcagtcccttcagtttcgtgttcaaatccagggaaatggtggtcccaggattgcaggctgcgtaaataacttacttgcggactgtttttatcgccgaagttttcaccagacagcagcatcgggattcctggcggatacgggataacactgtttgccgcgatgcgtcctggcagattttcaatggataccagttcgacattgttgtcgacaatcgcgttgtacgcttcacgcggggtgacttccgccaccggcaggccggaataggcttcgttcaaccgtgcgccagggttgttttctttcagccaggcaaacatggtgtcacccagatcgtgaatccccatgttcgcgtaagtgtcaggatattgttcaacaagttccggcatcacctgcgccagcggtgtgttggcgtcatagtggcgtttgaaggagcaaagggtgttaaccagagttccccatttcccacgggttacgcccatagagaacaggaacataatttggaagtcagtggtgcgggtaggtacaatgccgtggcgaccaagccaggcagtgaccagcgccgccggaacaccggtttcttccagttcaccatcttcacccattcccggagcaaggatgctgactttaatcgggtcgagcatactccagttatccggaatatctttgaagccgtgccagctttcgcccggatgcattacccagcagtcctgaacggtggtcagcagtttggttggtgcgtcagcaaagtcataggttttgccggtttgtgggtcggtgacgacttctttgttccacggtttgaagaaccagctaccgtcagcggtgaactctttatatagccgcgccatcgcctgacggaaatcaaccgcttcgtcaatcacttcctgtgtcagactcaggccgctgttgccgtccatcatgctcaccgccacgtcgttggatgcgcagatggcatacagcggggaggtggtggcatgcatcatgtaggcctggttgaagcgggagaagttaatcgccccacgaccttcacgtacatgaatataagaagcctgactcagcgcattcagcagtttgtgggtggagtgggtggcgaaaacggtaggaccgttgtgatcgccaggttcgccgcgcatggcatagtgatcggcatagatcgggttgaaacgtgcatagccgtaccaggcttcgtcaaagtgcagacgatcggaggttttttccagcagatcctgcgcttctttagcgttataacacacgccgtcataggtgcagttggtcaccacgcagtaagacggtttttgcccggctttgtctttggtcagcgggctttcactgattttcttctgcaaggtttcaggttgcatttcctgcggatagattggcccgataatgccgtagcggttgcggcttggcaccatatagaccggtttcgcgcctgtcagcatcaaaccttgttcgatggatttatggcagttacggtcaacgaccacgacatcgttatcggtcatgcaagcctgcatgatggtgcggttagagccggaagtaccgacgactacgctccaggagcgatcggcaccaaatacgcgtgcggcatatttttcgctttcgccaaatgcgccagtatggtcaagcaaagaaccgagggaagttcgttcgatgcccatgtcggtgcggaacagattttcaccatagtagtcatggtagaaacgtccggcgggtgttttggtaaaaccaacgccgccctggtggcctggcgctgcccaggaatattcatggatgtcactatatttcatcagcgcgctgaacagtggcggcaacagctgctggcggtagcgggtcatcgcggcaacggcgcgtccggcgataaagtcggcggtatcttccagaatccaggcgaattcatcgacaagctccagcaggtcgcgatccattgcggcgagggctttttcccgatcgcccaacaggaagaccggcacgttttgttggcgctcatgaagcttaccgatcaattgtctgacgttttgatgttcgtccggatgttccatttgatagctgaacatcaggcagtcaatggcttcgttactagagagaatggcaaaaccatcatcaaaggaggtggatttaatcacggtaacattttgctggcttaaagcatctgccagacgctcaacggcgttaccgacccaggtgtcttgatggagaaactcgctttcaacaattaatactttcatcattgcttacccggttatgaaggaatcttcgttgcgggcaagtatcttccggccttttcgggctgtaaagcgcgtgaaaaacaaacatttttgaaatatttagttttataaacaatacgttatgtgattattttaaattattttcactgcttattatcgacggctaaactatttttttggctgatactgatatcgtctttagccgggaaacgtctggcggcgctgttggctaagtttgcggtattgttgcgggctcatgccgacatatttgccgaacgtgctgtaaaaacgactactactacgaaagcctgccgtcagggcaatatcgagaatacttttatcggtatcgctcagtaacgcgcgaacgtggttgatgcgcatcgcggtaatgtactgtttcatcgtcaattgcatgacccgctggaatatccccattgcatagttggcgttaagtttgacgtgctcagccacatcgttgatggtcagcgcctgatcatagttttcggcaataaagcccagcatctggctaacataaaattgcgcatggcggctgacgctgtttttgtgtgtgcggctggttttattgaccagaatcggttcccagccagagaggctaaatcgcttgagcatcaggccaatttcatcaatggcgagctggcgaatttgctcgttcggactgtttaattcctgctgccagcggcgcacttcaaacgggctaagttgctgtgtggccagacttttgatcaccatgccgtgagtgacgtggttaatcaggtctttatccagcggccaggagagaaacagatgcatcggcagattaaaaatcgccatgctctgacaggttccggtatctgttagttggtgcggtgtacaggcccagaacagcgtgatatgaccctgattgatattcactttttcattgttgatcaggtattccacatcgccatcgaaaggcacattcacttcgacctgaccatgccagtggctggtgggcatgatatgcggtgcgcgaaactcaatctccatccgctggtattcgctatacaggctcagcgggctgcgggtctgtttttcgtcgctgctgcacataaacgtatctgtattcatggatggctctctttcctggaatatcagaattatggcaggagtgagggaggatgactgcgagtgggagcacggttttcaccctcttcccagaggggcgaggggactctccgagtatcatgaggccgaaaactctgcttttcaggtaatttattcccataaactcagatttactgctgcttcacgcaggatctgagtttatgggaatgctcaacctggaagccggaggttttctgcagattcgcctgccatgatgaagttattcaagcaagccaggagatctgcatgatgtctgcacccaaaattacatttatcggcgctggtagcacgattttcgttaaaaatattcttggtgatgtgttccatcgcgaggcgctgaaaacggcgcatattgccctgatggacattgaccccacccgcctggaagagagccatattgtggtgcgtaagctgatggatagtgcaggggccagcggcaaaatcacctgccacacccaacagaaagaagccttagaggatgccgattttgtcgtggtggcatttcagattggcggttatgaaccttgcacggtgactgatttcgaggtctgtaagcggcatggtctggaacaaaccattgccgatacgttggggccgggcggtattatgcgcgcgctacgtaccattccgcatctgtggcaaatttgcgaggacatgacggaagtctgccccgatgccaccatgctcaactatgttaacccaatggcgatgaatacctgggcgatgtatgcccgctatccgcatatcaaacaggtcgggctgtgccatagcgtgcagggaacggcggaagagttggcgcgtgacctcaatatcgacccagctacgctgcgttaccgttgcgcaggtatcaaccatatggcgttttacctggagctggagcgcaaaaccgccgacggcagttatgtgaatctctacccggaactgctggcggcttatgaagcagggcaggcaccgaagccgaatattcatggcaatactcgctgccagaatattgtgcgctacgaaatgttcaaaaagctgggctatttcgtcacggaaagcagtgaacattttgctgagtacacaccgtggtttattaagccaggtcgtgaggatttgattgagcgttataaagtaccgctggatgagtacccgaaacgctgcgtcgagcagctggcgaactggcataaagagctggaggagtataaaaaagcctcccggattgatattaaaccgagtcgggaatatgccagcacaatcatgaacgctatctggactggcgagccgagtgtgatttacggcaacgtccgtaacgatggtttgattgataacctgccacaaggatgttgcgtggaagtagcctgtctggttgatgctaatggcattcagccgaccaaagtcggtacgctacctagccatctggccgccctgatgcaaaccaacatcaacgtacagacgctgctgaccgaagctattcttacggaaaatcgcgaccgtgtttaccacgccgcgatgatggacccgcatactgccgccgtgctgggcattgacgaaatatatgctcttgttgacgacctgattgccgcccacggcgactggctgccaggctggttgcaccgttaaaacgcgactaaacgctactgcgccgggggatttattccggcgcacacctctgacgataccaataacagaaggcgggcgttggtaacagcgacccgataccctatgagcatttcaatgactacaaaactcagttatggatttggagcgttcgggaaggattttgcgatcggcattgtgtatatgtacctcatgtattactacaccgatgtcgtcgggctgtctgtgggtttggtcggtactttgtttctggtggcgaggatctgggatgctattaacgatccgattatgggatggattgtaaatgctacgcgaagccgatggggtaagttcaaaccctggatcctgatcggtacgttggcaaactctgtaatcttatttctcctctttagtgcgcatctgtttgaaggtactactcagattgtctttgtttgcgtgacctacatcctctggggcatgacttacaccattatggatattcccttctggagcctggttccaaccatcacgctcgataaacgtgagcgcgaacaactggttccttatccgcgtttttttgccagtctggcaggctttgttacggcaggtgtgacgctaccatttgttaattatgtcggcggtggcgatcggggatttggctttcagatgttcactctggtactgatcgccttttttattgttagtaccatcatcactctgcgcaatgtgcatgaagtctttagcagtgacaatcaaccgtctgctgaaggaagccatctgacacttaaagccatcgttgcgctaatttataaaaacgatcagcttagttgcctcttgggtatggctcttgcttataatgtagccagcaacattattaccggctttgctatctattatttcagttatgttatcggtgatgcggatttgttcccctattatctgagctatgcgggagctgctaacctggtgacgttagtattcttcccacgcttagttaaaagtttatcccgacgcattttatgggccggagcatctattcttccggtgttaagctgtggtgttctcctgttaatggcattaatgagctatcacaacgtcgtcctcattgtgattgcgggtattttgctgaatgtgggaacggcgcttttctgggtattacaggtcatcatggtggcagatatcgttgattacggtgaatataaactgcacgtacgctgtgaaagtatcgcttactccgtgcagactatggtggtgaagggcggtagtgcctttgcggcttttttcattgcggttgtgttagggatgattggctatgtaccgaatgttgaacagtctacgcaagccctattaggtatgcagtttattatgattgctctaccaactctgtttttcatggtaacgctgattctctacttccgtttctatcgcctcaatggtgacacgctgcgcaggatccagatccatctgctggataaatatcgcaaagtaccgcccgagcctgttcatgctgatattccggtcggtgcagtgagtgatgtgaaagcctgacgtggacaatagctaacgaaaatggcctgatgcgatatgtttatcaggccacgtcttaatgtaatgctttggatttgcaaattttgtagaccggataaggaattcacgccgcatccggcatcaacaaagcgcaagttgttatccggttatcaagccaaagcgccgtagctggcggcaatgaaagcgagcgaggaatatcaccgtcgttaatgcgccaagcagcgcgcagaacatatcggattgcgtgtcccactggtcgccctgggtgccgagaaaatcatccgctccctgacccattgccagcgctgcccaccactcgattaattcatacatcgcgcttatcgccagcgccacgcagcagaccaggaacgccaccattttacgtccgcgcacgtacatcccgcgaacgagaatttctcgtgccaccagtgcaggcaccagcccctggaaaaagtgccccagcttgtcatacggattacgactcaaccccagccattcctgcacctcaaaaccaacggggactttcgcgtaggtgtattgtccgccgaccatcaggatgatggcgtgaaggaaaatgagcgtatagagcagcggcgttaacggataacgtctggcggtggcaagcagtagctgcacgacaataatcaccggtgtcacttccatcagccaggtgagtttgtcatgggcgctaatgccggtataaatcaggattaacgttagcgtcagtgcgctggtgttaagaattaacggcttgagtgtgcgggtcatggtgagttcgcaaatcagggaaaatactgactattcaccagcaagcgtgaaattacaatcgcaaaagaggtggccagggggatcacctggcagcatgctgccaggcgctgggccgaagaggttacttagtgcagttcgcgcactgtttgttgacgatttgctggaagaagtcgttacctttgtcatcgaccaggataaacgccgggaaatcttctacttcgattttccagatagcttccatacccagctccggataagcgacgcactccagatgcttgatgctctgctgcgccagtaccgccgccggaccgccgatgctaccgaggtagaagccgccgtgtttatgacacgcgtcggtaacctgctgactgcggttacctttcgccagcatgatcatgctgccgccgtgggattgcagcagatccacgtaggagtccatacggcctgcggtggttgggccaagactaccacttggataaccggcaggggttttcgccggacccgcgtagtagatcgggtgatctttgatgtactgcggaagttctttaccggcgtcaatcagctctttcagcttggcgtgtgcaatatctcggcccacgataatggtgccggtgaggctcaaacgagtggataccgggtattggctaagctgggcgaggatctctttcatcgggcggttaaggtcaactttcaccgcttcgccttcaccggcctggcgcagttcttgtggaatgtactggcctgggttgtgttccagtttttcgatccagataccttcgcggttgattttcgctttaatgttacggtcagcggagcaggagacgcccatgccgaccgggcaggatgcgccgtgacgtggcagacggataacgcgaatgtcgtgcgcgaagtatttaccgccaaactgcgcgccaagaccgagtttctgggcctcttccagcagttcctgttccagctggacatcgcggaacgcctgaccatgttcgttcccttccgtcggcagttcatcgtaatagtgagcgcttgctaacttgacggttttcaggttggtttccgcagacgtaccgccaatcacaaacgcgatatggtacggcgggcaggctgcagtaccgagggtacgcattttctcgacgaggaagtttttcagtttgccgggagtcagcagggctttggtttcctggtagagatacgttttgttggcagagccgccgcctttcgcaacgcaaaggaatttgtactcatcgccatctaccgcgtacaggtcgatttgcgcaggcaggttagtgccggtgttgacctctttgtacatgtccagcgccgcattctgactatagcgcaggttatcttcgatataggtgttatagacgcctttgctcagcgtttcttcatcaccgccgccggtccacacgcgctggccttttttaccgacgatgatcgcggtgccggtatcctggcaggtcggcagcacgcctttggcggcgatttcggagtttcttaagaattgcagcgccacgtacttgtcgttttcgctggcttctggatcgtgaagaatagccgcaacctgtttctggtgtgccgggcggagcataaaagaagcgtcgtgaaaggcttgctgcgccagcagggtcagggcttctggttccactttcaggatggtttcgccgtcgaagtcggcaacgctaacgtaatcggaagtgagtagatagtattcggtattgtctttccccatcgggaaaggtgcctggtagataaagggtttgttactcatagcttccagcctgtaactctgtatttgttattcgaaaatggcgtgccgcgtagtcacgggcggcacgcaaagtgcatttataagaacccgtacatcgcggcgaagatccagccgaagacgcagcttacgctcacaccaatcaaccccggcagaataaagctgtggttgatgacgaagcgaccgatgtgggtggtgccggaacggtcaaactgaatcgctgccagatcgctcggataagtcggcaggatgtaataaccgtagcaagccggtgcactagccacgatgtatgccggatcaacgccgatcgccagcgcgaccggaacaatcgccgccagcgccgcagcctgagagtttacaaacttggaaaccagcagcagaacaatggcataggcccacggatactctttcaccatttcacccagtacgccctgaatttcagacatatgcgcaccgaacatggtttctgccatccatgcgataccgtacaccgccacgatggcgatcataccggaacggaagacttcgtttttactgatagacgcgggattggttttggtcaggataataatcagcgccccggtcagcagcataaacatctgaataaccagtaccatgctcagcggtttgccgccgaaggatggacgcaggtcgctatcagcaccaagaagggcgactacagcgattgccccgaggaaaatccacattgccagccagttgcttttcggcagttttttatccagcagcgtcgcggtatcaccgtaaacatactcacggttttccggtacggagatgaatttctggaactcttcgtctttatccagatctttaccgcggaaccagctgaagataccgatcgccaggataccgattaacgtgcttggaatggtgattgccagcagatcgaggaactcaagatggcgaccatcaaaggtgacattacccagcatcgcaaccagagacacgaccgcaacgctcaccggactggcgataatccccatctgtgcaccgatagaacttgccgccatcggacgttccggacggatgttgttcttaatggcgacgtcgtagatgatcggcagaatggtgtaaaccacatgacccgtaccgcaaagaatggtcagtgtacaggtcacaaacggcgcgacaatactgacatatttcgggttgcggcgcagcagcttctcggcaatttgcagcatgacatcaagaccgccgctagcttgcaaggtcgcgcttgccgccaccaccgcaatgataaccagcatgacatcaactggtggtttacctggctgaaggtggaagacgaagaccagaatgaccagaccgataccgcctaataaacccagcgcgataccaccctttctggcaccataaaacagacatatcagtattatgataagttggatagtaaataacatgtgtgaaccctcgcgataatcctatttaaatttttgctgaatagatcacagtcacgttctgttttgtatgaactgttttcagagcctgactaaatatccgtttggtcgttaccggctttagcaaatacctcacagtgaatattggctgattaaagcagcggcaaatttatgcactgtgataagcggctttttcagagagaaagactctctggcgatgggtttatagtttgtactgcgcagatgttaatgttttgtttgctgttatcttattgatatttatcggtctattttttgttctcagggcagatgtcattaggtttatagattaatctgatctacccatttgtgggtaaaaatacacataatgcgggtgacataatagttaattaacttttgttagcgttttgaaattaaaaacaccgttcacctgaagagatattaatttttagcgatgatggagggataattatatttgatctggcacaagttttactgatgaaggatgtaacttgtgccaggggtattttgcattacggtaataattattacttacagataaccagcgatccgttattggcaatattgtttcagtagactgtagtgttctgcctgaatacggtaacggtaaactggacgccccgtgacgccataatggatactggtgaacaagatgtggcagttgaccagccagatgaggtatttacggcaggaaacacggctaatgttaacctcgttggctagctcgtcggtactaaattcatagtcctgatgcgcgtcaatccactggcacagtgtgcgtaacgtctgcggcgttaagccttttggcaagcgacgaggatcctgttcgttggagctgctgccgtggattagctgatcaagctcggcctggtcataatactgatgtttttccagcgccattttcttttgccgccagccggtgagcgcctcttcaaagcgggaagcctggaagggtttgatcaggtaatccacgacaccgtaatgcaggctatctttaatggttgccgcatcggctgcggaggagatgacaatcacatcacttttgcaacgcgcgttatgcaggacaggcagtaaatcgagcccgttctctttttgcatatagatatcgagcaatatcaggtcgataggcgtatcgctattgaagataatctctttggctttctccagcgtgctggctgttccacagcattgaaagcctgggatttgtgctacgtatcggcgattcagctccgcgaccattgcgtcgtcatcgataattaatacattgatcatctgttgctcctctccccgtcccagggtatctggacaaaaaattgtgtgaaaatcccgggttcgctttccacggcgatgctgccgccgagattttctacctgttgtttgacaagtgctaaaccgacgcctcgctcgcttccttttgtgctgacacctttgtcaaaaatgtgatcgattttatcgggtgcgatccccggtccatcatcattaacttcacagtgcagccagccgtgacggtagtgcaatgttacgctaatttcgcctccgggttccggccctaatgcctccagcgcgttttctatcagatttcccaacgtggtaatcagcgtcgcgacctggtcctcactgccgctgtctggcagctggctttcactgtttaaaatcagcgtatggcctaaatcggtcgcgcggttaatcttgctgattaaaaaaccagcgataaccggagatttgatcttacccagcagagagccaatctcttcctgatagttattggctgttttgagaatgtaatcttccaactgcttataactcttcagatgcaataatccgagaatcacatgcaatttattcataaattcgtgggatcgttcacgaagtgcgtcagcatagttgaccagaccgtcgagtcgctgcatcagtttacgtacttcagttttgtccctgaaggtactaatggcaccgatgataacgccattactgcgcaccggaacggtgttgatcagtaatagccggtctttaatcgtaatctcttcgtcgcggcgcggggtaccgtcgcgtaacacttcgctgacatctaccacctgactccaactgtggcttagcgtgctcagtttctcatcgtcctggctcttacggtaattcagcaattcttgtgcggcatcgttgatcagcgtgacctcgccgcgatcgtccacggcaacgacgccttctttgatagactgcaacatggcctggcgttgctcaaacagcgtggagatttcgtagggttccaggccgaaaaggatttttttcagtaccttaaccagaatgcaggtgccaatcagtccgaccagcatgccaaataatacgctccagataatgctccagcgactgtcattgatctgttgggtcacacggcttaactcaaggccgatcgccaccacgccaatttgtttatgattttcatcgtagatgggggtaaatacgcgtaaagcctgcgccagaaaaccgcgattgatagcgacattttcttcgccattcagcgctttaaggatgtcatcacctttaaatggctgaccaatacgctgggcttcaggatggctgtagcgaagactttgcatatcggtaacgacaataaacagcagatcgttgcgtttgcgtacggcttccgcgatggcctggatgccactctcctgcggttttttctgcaagccctgacggatttccgggctgtcggcgagggtacgcgccactgccagtgccttgttggctagcccatctcgcgtcatatcactgatttggctgaagtaaatcagatgcaccaccaatagcacgctgaacagtaccgcactgaccattaagatcactgtggtactcaatttcatcggacgtttgcgtaacatgcggtagggcaaactatgtctcatcagcttccttgtgtgacaaatttcttaagcattatctctgatgaggcgggtaattcaaagggagtaagaatgattggctatataggggaagagactctggcaacggaaactgccagtgctgtatgaagattccggggctatgcttatagcgataatcatactgatgagagagggaaggtcatggatcaggcgctactggacgggggttatcgctgttataccggcgaaaagatcgatgtctatttcaacactgcgatatgtcagcattctggcaattgcgtacgtggcaacggcaagttatttaatctcaaacgaaagccgtggatcatgccggatgaagtcgacgtcgccactgtggttaaagtgattgatacgtgcccgagcggcgcgctgaaataccgtcataaataagcgagggtaaaatggaaatacgcgaaggccacaataaattttacattaatgacaaacaaggcaagcaaatcgctgaaattgtctttgtgccgaccggagagaatttagcgattatcgaacataccgatgtcgatgaaagcctgaaagggcaagggattggtaaacagctggttgcgaaagtcgtggaaaaaatgcgtcgggaaaaacgaaaaattatcccattatgcccatttgcgaaacatgaatttgataaaacgcgggagtatgatgatattcgcagttgatgggagagtacagagtcacgatatttttcattctctccgcgatgtgatgcaggagagcatctgaagggtagggggatgcacaaagaatgggcagagagcgcgtttttttgtcccaagtcatcccctttactgagcaaaaaaaagaatatctcctatatgagaatcatcaatcggggttaataagttttgcgtccccagagcgtttaatattgataggagtcatattatggaaggtaaaaacaagttcaatacttatgttgtttcttttgattatccaagttcttattccagtgtgttcttaagattaagaagtttgatgtatgatatgaatttctcctctatcgtggctgatgaatatgggataccacgacaattgaatgaaaactccttcgcaataacgacaagcttagccgcaagtgaaatcgaagatttaatcaggctcaaatgcttagacttaccggatattgattttgacctcaacattatgacagttgatgactatttccgtcagttttacaagtaaccaggaaggataagaagaacataaaaaatggcactattctctaaaatattaattttttatgtgattggtgtgaacatatcctttgtcattatctggtttatcagtcatgagaaaacacatattcgtttacttagtgcattcctggtcggaataacctggccaatgagtctgcctgtggcattacttttttctctcttttaagagctgtagttgagtggacccgctggttatcgtgaaacgaagcgtctctcctcaaaactggatttgcggaacgatgaacgaagcagtcgcctgactgcttcgttcattaaagtgaaatttatttctgtgggcgcatcgccgggaagagaataacgtcgcgaatagtatggctgttagtaaacagcataatcattcggtcgataccaatacccagaccagcggttggcggcagaccatattccagcgcagtcacgtaatcttcgtcatagaacatggcttcgtcgtcacctgcagctttagcattaacctgttcctggaaacgttcagcctgatcttctgcgtcgtttaattcgctaaaaccattaccgatttcacgaccaccgatgaagaattcaaaacggtcggtgatttccgggttaacatcattacggcgtgccagcggggacacttctgccggatattccgtaataaaggttggctgaatcagatgtgcttctgccacttcatcaaagatctctgtgacaatacgtcccaacccccagcttttctctaccgtaataccgatagattcagctaatgctttagcagcatcaaaattatccaggtcggccatatcggtttctggacgatattttttgattgcttcgcgcatggtgagtttttcaaacggtttgccgaaatcaaacacatgctcgccataagtgactttagtggtacccagaacctcttgtgccagggtgcggaacagactctctgtcagttcaatcaaatcgtggtaatccgcatacgccatgtagagttccatcattgtgaactcaggattatggcgaacagaaataccttcattacggaagttacggttgatttcgaatacccgttcaaaaccgcctacaaccagacgtttcagatacagctccggcgcgatacgcagatacatatctaaatccagagcattatgatgggtaataaacgggcgagcagatgccccacctggaattacctgcatcatcggggtttctacttccataaagccgcgcgcgaccatgaattgacggatagcggccagaattttactacggacaacaaacgtttgacgggatttatcgttagcgatgaggtccagataacgttgacgataacggacttcctgatcctgcagaccatggaatttatctggtaaaggacgtagtgctttagtcagcaggcgcagctcagtacagtgaatggaaagctcacccgtttgcgtcttaaacagcgtaccgcgggcaccgataatgtcacccagatcccattttttaaactgatcgttataaacaccttctggcaggctatctcttgcaacgtacagttgaatacggccaccgacatcctgcaacgttacaaaggaggctttccccatgatacgacgggtcatcattcggccagcaacgctgacttcaatgtttaaggattccagttcctggttatccttcgcatcaaactcttcgtgcaactggtcagaggtatggtcgcggcgaaaatcattgggaaacgccacaccttgctgacgtagtgccgccagtttttcgcggcgatttctcagttcatcgttaaaatcaatagcctcattggctccccgtgtttcttgttcagacattttggttcctctaaatccagctttcaatttagcgtagataaagagacagatcggtacactgtattatctgcctcgactattagtaactcagtttatcttatcgaaactaacgcttacctcaagttgatatcactaataaataaccatcaaaatggtttaaatgacttattaatctcgatttgttagtgttataaactaaaagttaatttattcataaccaattgtttttacgacagttaatcgttgctctcctgtatcatattcgtcggcgtgctaaacagaaaacgggtagcaaaggccaatacgacgatgatcgcgacacaagccaacgtccactctcccatctgagaaaagaatcgctggtaagctgcaattgccataccgctaatttggctctctgtcgtctgctgtgccacgacgcctgccagccagttggcgaccgcgcctgttgccagcatataaatcccggttaatacgccagacattttcagacgcgtgatttgcgcaatcgccaccgggtcaataaagagttcggcaaagcccattagcgccagcccggatatcatcacgcccatactcgcttgaccgtcagccgctgcatgtcgggcatcaaatgccaacaacataaagccacaagccatcagcagtaagccaaaggcaaacttcagccagacgcgcaatgtactgttgccgcggctttctgggctcgccagccaggccagtacaaccccagcgagcatcaccgcaattgcattcacgctctggaatagtgctgtaggtacttcaatattgaatgcctgacgattcacaaagcgatcgataaacaagctgatggtactgccgccctgttgtgccagtacccagaacaatgtcccgacaaacatcaacaatacaatttgccaaagagcacggcgatgttcggggaatttgatcatcatgcgggcaatgatttgtgcggcaatgaggcaaacgatcgccagcaaatatccggaccagtcgttctccagcagcagagtaaaaaatactggggctaaacagagcatcaccactaaccagctccatactggtaaggcaaatttgacactagtgagcgcttttttatccatactacgtgtggactggaaatgacgatgaccgcttaagaaaatcaacaaaccgataaacatgccgccacccgcaagggcaaagccaacatgccatccataccactgagcagccaggccgcaggcgattggggctgcgatagaaccgatattgcccgcagcatacagcaggctaaaaccgccatcacgtcgatgatcgttctcgtcgtagagctcgccaagcaaacagctgatgttacttttgaataaaccgtagccacaaataatgattgccagcgccagatacaggctaaaggtactatttgtatcaatacccagcaccacatggccaagggtcattaacagcgcgccggcaatcactgcagtgcggttgccgagcaggcggtcggcaagccagccgccgagaataggggtaacgtaaaccagagaagcatatgcgctgaacaggctgatggcatggttatcatcaaaaccaagctgatgggtgagatagagaatgagtaaggcacgcatgccgtaaaaactgaagtactcccagatttggatcgccacgatatagtatatcgcgcgcggctgactgggtgttttcatgtgttctccttatgagcaaaaaagggaagtggcaagccacttcccttgtacgagctaattattttttgctttcttctttcaataccttaacggtatagcggccatcagcctgacggtatgcaccgtgaatatcggtttcaaagcccggatagtgagcgccgatttcacacagcatctgcaggaactccagaaccggacgactttcttcggtgatcatttcacccggcattaccagaggaactcccggcgggtacggaaggatcatattggcgttaatacgacctaccatttcgtcgaggtaaacttcttcggtcataccgtgcagctctttctggaatgcagcatacggagtcattaccatcgtcggcagcacttcaaatgcgcgatacatcagatccggcagattgtggtgaacaatcagtttgtggatattctgagccagttcctgaatacgcatgttttcatagaattcaggatcttcacgatacagagacggcagcatgtttttcacacgcaggttcaggtcgaacgcacgtttaaagtcagtcagagcacgcagcaggctcagtgctttggtcttatcgataccgatgctgaacaggaacagcaggttatacggaccggttttctcaacaacgatgccatgttcgtcgaggtatttcgccacgatgctggccggaataccaaagtcgctcatggtgccgtctttttccatccccggagtcagcagggtgactttgatcgggtcaagatacatgtgctcgttatcgatgtttttgaagccgtgccaggtgctgtcagaacgcagcggccagcattcagtcgtatcgatatgatccggctgccatacatcaaagaaccagccatcagattccgttctcagacgtttgatctctttacggaatttgatcgcacgttcaatagaaccgttgatcagacgcttacctgcattgcctttcatcatcgccgcagcggtttcagtggacgccacgataccgtagtgcggagaagtggtggtgtgcatcatgtaggcttcgttaaaggtttcttcgtttacgtcacctttaacgtggatcatggaagcctgagagaacgccgccagcagtttgtgagtggactgggtttcgtaaatcactttcccttctacacggccaccgctcataccgcatttaccttcgtaaatcggactgaagttggtgtaaggcacccacgcggagtcaaagtggatggatttcacatccagtgttttcttgatgaagtcggtgttgtacagcagaccatcataggtagagttggtaattacagcatgtaccggccaggttgcgtttggtgtttctttcacgcgcttagcaatggtagcgtgctggaattcactctgtgggataccaccaagaataccgtaagcgttacgggtcgggcggaaatagattggcgtaacatcgctcatcatcatcaggtgggtcaggcttttgtggcagttacggtcaatcagaatggtgctgcctgctggagcagagtacataccaacaattttgttcgcagtggaagtaccgttggtcaccatgtagctgcggtctgcgttaaagacgcgagcgatatactgttctgcttctttgtgtggaccactgtgatccagcagagaacccagttcagatacactaatggaaatatcagatttcatggtattcggaccaaagaaatcatagaacaggctacctaccgggcttttctggaatgcagtaccgcccatgtgaccaggagtacagaaagtatatttaccttcacgaacatatttaaacagtgctttagtcagcggaggcagaatagtgttgatatattcgtcagtggtctgcttgatcttattagcaatatcttcagcagcacccagcgcatattcaaagaagctaatctgtaaacgcaggtcattcaggcttacatcgagagtggaatacgtattagcgaacgcgtacaacggcaggttctcgttcattttgctaatttcttcgcacagctcgagattatatttatcccagtcaaaaataacgccgcacagacgcgcattgttttcgatcagttttaataagtcgtcacggtcgttcgggtaaacaatctggaagttcagacgttcaagcgcgcgatgaagttcacggatgggttcttctttaaaataaacccccatgtgattcaatattgcaataacgttcatagtcatatctccaggtaaaaaaggcccctcccaacacatgggacaaaatgaaaggaggagcctcggaaaatacttttaattaatgtgcgttagacgcggtgtggttatccatactgtggctctggcgctcgtgcattttgcgagcgtagaacatcaggataatcaggctgacgatgaaggtacctgccagctcgaaggagcttgcgcccatcagcgcgatgaagcagaacacgcaacccagtacagagcagatcaggctgacaaagttgcggatgttaacgccttcaaaacgaatcaggtcaacgcaagagtagaaatacggcagcatagtcagcagtactgcgataccggtcagttcaccgaacaggtcagatgctttaccaccggcagagttcatcagagtgataaggatcatcagggcagtcattttcactgcagccagcagcagaccttttttcggaataccgttgctgtcgacttcaccataaactttcgggaagttaccgtcgttagcggcacgtacacctgcctggcctaccaacatcatccaggagcccagagaagtcaggcacgcaaaggcggtgaatgcagaaaccagcggcgcagcccagttaccgaggatagtactagcactgattgcaaacggagcaccggaagccgccattacagaagacggatacataccggaaagcacctgagtcgcagcgatgtaaacaatacctgctaaaccagtacccagcatggttgccagcggaacggtacgtttcgggtttttaaccataccagtacttacagctgcggattcaacacccacgaaggcccacaggcagagcagaatacttttaatgatcgcatgaccatcagtggtatccgcagtattccagttagctgcataagttgccgcatcaaaccaatgccagccaacaatagcagtcatcaccacaggaataagaaccagcaccagaccaatagtggttaaacggcttacccaagtaccgccgagcatatttacaaaggtaaatacccagacgatagcaatacaggcgatacccgccggaacaggatcatttaatactgggaagaaggtggaaagataagatacagcggtaataccaatcgccaggttaccaatccagttagcatggtaataaagaacacctgtctgaaaaccaaatgcaggggaaatttctccggcataagcaattgggccaccttgttgcgggttttttgttgccagtcgggcatatacatacgccaggctcattgcaccaataatagagataatccaaccccagatagcaataccaccgatacttgctaggttcgcaggtaataatgcaataccgctccccatcatattaccggcaacaacaccggtacaggcaaatagcccgatcttcttggcagaactcatgctcttctcctaatttcatttttgaatttggagtccgggtcatgatgtataactatttcctgaccagaccaaactggcgataagattactcacgaaaaaaggattaatcctaaagattaggtgaaataacacaaaagtttctgtaagtgagaacttgaggttttttattaacacatcaggatcgcaagttgatatcatgaaaagataaacatttaatgtttacaatggattgcgtgacattctctggttaaatttatgtaataaaaattatgcggcaaataaattgccgcaacatattataccaacaggaacatacaaaaactcaacaacaaatatttccgagcataaatcaacccggagttacttattcactagcaagaaatttgtcgagataaggtacaacataaggaacagaagtctggaatataccattttcaatccagtaaagggtgtttgcccctgggcgtaaattaaaggcggtgagatatgcatcagctgcttcccggttcatccccttcatttcataaaccttgccaagcaacacataatttagccaggacatttcaagatcaatgccagtatttatcgcctggtaagactcatctgttttaccttttaccagagcactgaccgcttttatttgatatataatggacaggttgttcaattccggcagtgtaacaatgttatctatttctgtgttcagtgctgctaattgtttttcatctaaaggatgttgagaatggcgcacgatatcaactaatgctttttctgctctcgcgtaggtaaattctggggaactttgaacaatctcacctaataattcactggcacggttcaaacttttatcatcgccatgcagtaaataatcatgtgcctgataaaaattagttaataacgcaccacgatgcggcaaaattttctggagcgtctcctgcattcgttgtggccacggttggtttaacgctttacttaaactctccagtaaatcattttgaatcgccagctgattaccgttagtgatgacataacgtttatccagcatggtactaccatctgcattgtctaccaattttatgctcataaagcattgttgagcacggtattggcgctgattaacaaacgcaatagataatgttttaccggaactgctcggttcatcaatgttgtagttgattttgtcatgcaccataaaggtggagaaggtgttaagacttgtcgccaccaaatcacccacgcctatcgcgtaagagagctgatacggggaactccagctgttacaacttttatttaccatattaatgtcaatatcgcgtggattgagcaaaatacggcttttgctcataggaagacgtgtatcaagactactaaacgctaccagtgctacacagatacctaagctcaacaggaaaaaaaaccatacccaaaaggtagtgaatcgtttgcttttaactggggattgttcaggtggcgttgcggtgttttgaatgttaagactgtgggagggagaatctgtggcaggaaccgcctctggtatagggggagggctagatagcattatttcctctccctcttcttcgctgtaccagataaccggcaccattaatttatagccgcgctttggtacagtagcgatatagacaggactatcttcatcattatcttttaaactcttacgtagttcactgatactctgcgtcacaacgtgattggtgacaatacttctcttccagacattatcgataagttcatccctgctaagtacttcgccactgtgttgagcaaagaaaaccagaagatcgattaatctcggctcaagggtaagttgacgcccattgcggctaatttggtttatggacggagtaacaagccattcgccaacgcgaactacaggttgttgcataatagaaactcattcgaaaagggaatgatgcaatgataattgccacaacctatttttaccatctatagatgggtttatttacatattattggtgaatgcaagacgttatttttaccagccataaacttcttgattacatagtattacgaaaggattttactgagaaccagaagtaatattccttaccatcaaaattcatcatctttgccaaagaaaaatgttcagaaaataatccatggaaaattgtccggagcacttactattttaatggattgttagtctttgcatgagcaagcgaactgatacatttctctttgttctcattcagaaaatctcatcagtcgccgttcagaccggtgttgtgctttatggatgcgttacgctcctgatgacgtcatttgacgttcaacagcatcacggggccgcacgacatttcacgtcagttagtgctatagctcaggaacaaattttcccgaattgggatatgcccgcaaattgctggtgatgtggggagaatctggttgagttcggtagaattgatttggaggcagaacgcttaaatcgtggcgtcctgaaacgaaaaacggacctccgtggaggtccgtttatatgaatttggtgcccggactcggaatcgaaccaaggacacggggattttcaatcccctgctctaccgactgagctatccgggcaacggggcgcattaaaccgtaatctgcacatctcgtcaacctaatttcagtaaaagcgattcaactgcttaagattgcggcaaatcgcttcttttctgtgtttctgtcaggtcaatgcaccaccctggcggcagcgggcgaagcgcaggatatcttccgccagccgatgtgcagtgtcgacatccgcctggctacgattcaccagcattcggcttaaacagccttccagcaccagttccatctgctttgctaccatcgccggatcgtcaacttccagtgtggttaacagttcgtgggtgaaatcgtaggccgcgcttttttgctgatcggccagttgatgaatagggtggccaggatcgggataaaacgtacaggcagcgataaatagacagcccggatagcggttgtttttaacgcactcgcttaacgcctgataacgtgccagcagcttttgttcggcggtttgcgtttcgtccagcatcagctgacgacgccagacatctatctgttggctaagataacgcagcgcatcgtagaggattgcctctttgtctggccagaagcggcgtagctcgtccagtggataatccacacgttcagcaaccatctccagcgtggtgttggcaatcccttgtaattctaataatttcagggcttctcccagtacatcttcacgttgcacgctattttcctccgtctttcccactgcaagtgtcgttcacggttggcgatcgcgcaaatgtgcgctgaaggtttcagcatccataaagcccgtgacgcgtgcttgtggatgctcctggccttgtccgtcaaaaaagagaattgtcggtaggccaaggacattaagatgctttaacagcgccacatcttgtgcgtcgttggccgtgacgttggcctgaagtaagaccgtgtctgctaacgctttttgcacctgcgggtcgctgaaggtgtatttctcaaactctttacaggcgacgcaccagtcggcataaagatctaacatcaccggtttgcctttggcttcaacgagcgcctgatttaactcatctaccgttttgatttgtgtaaagttgagatgcgtctgagtttgcgcggtatgcgtcgcaccaaatgcccaatcctgaagtgggcgcacgctaaccaatgccgctgccagcagaataatttgcacaatacgcatccagccgcgtttagcctgtaggctggtgataaaggcccagccaaagaatgcgacacccagcgcgctccacaagcgtaatccccatacatcaccaatcactcgctccagcaggaagaccggcagtgcgaggatcacaaaaccaaacgcggttttgacttgttccatccacgggccgcttttcggcagcaagcggttaccaaagacggtaattagcatcagcggcaggcccatgcccaacgcatagagataaagcgtgccgccgcccagccacatgttcccgctttgggcgatatacagcagaatcgcgctaagcggtgcggtggtgcatggactacagatcagtccggcaatcgcccccataacaaacacaccgccaggactgccgccctgttggcgattgctcatcaacgtgagacgtgtttgcaggctagaggggagttgcagggtaaacaagccaaacatactcatcgccagcaaggtaaagacgatggcgaggccaatgagcacgtatgggtgctgtagcgccgcctggaactgtaaccctgcggcggcaaccaccagacccagcgccgtgtaggtcagcgccatcccctgcacataaataaaggtcagcaacaatgctctggcagtggagagccgctgtttaccacccagcacgatgccagaaatcagtgggtacattggcagcacgcatggcgtaaaggcgataccaataccgatcaacaacgcccagagcgcggaaaagggcaattgcgcggtgggctgctcttgctgcggaacagacacaggctgtggcgctgcgttgttggcgaccacttcgcttaacggaacggttttggtttctggcggataacagaaaccggcatcagcacagccctggtaggtgacagttaacgtcgctcccgcactcgcctggttgatggtgacgggaagcgtcagccgatcgcggtaaatctcgcttttgccgtaaaactcatcttcatgccagacgccttgcggcagctgcacgtcggcaattttcgcgtgttccggcgtaatgcggatctgtttacggtagaggtagtaaccgtctttgatctgccaggtcagattaaggtcatgttggttttgctgaaaatcaaaagcaaaggcttgatccgcggggacaaattgactacgtcccggcgcgtcgaataatccggcaaaaacggaagtgctgcaaagtagcaggatcagcgtaaagatgcgttgagccatgagaggtaatctgtgtctccttatgtcagcgtaaagatgcgttgagccaactgaggtaatctgtgtctccgtgtgtaacaggtaaaaccagaagttccggggtttgatatggatgatgagacttcaggcattccagcagtgcctgctggtgagatacggtagtttttaaaatcatctgcacttcgtattcttgctccagcttaccttcccagtaatagagagaggtagcgccggggatcaaggtcgcgcaggccgccagtttttccgccagcactttggcggctaaatcctgggctgtcgcttcatctggtgccgtacatagcaccacgacagacgcggtattgctacttttttcatcaagcataaacacctcgcaagaacagatggaaccgcaagagagaggtcactatacaacggacgggggaaggatgttagtcggcgggaaagaaagcggggcgtgaacgccccgcgattgatcattacagcatgaagctacccagcacgaagccgaagcaaacggccagggcaacacccagagtacccgggatgaagaacggatggttgaagacgaatttaccgatacgggtagtacccgtgtcatccatctgtaccgcagcaaccagcgtcgggtaggtcggcagaatgaacagaccagacaccgcagcgaaagaagcaacagcggtcagcggactaacgttcagtgccagagccatcggcatcagtgcttttgcggttgcagcctgagagtacagcagagcagaagcaaagaagaagatgacggccagcagccacggatgaccctgaatcacttcaccagcggtatctttgatccagtcgatgttgttggaaacgaaagtatcgcccagccacgcaacacccaggatacaaatacaggcgctcatacctgctttgaaggtgctggagttgaggatgttgtcggtatcgactttacagataacggtggtcagagttgcaacgctgagcatgatgatcaggattgcgttggtggtgttcatcagcggtttttcaaccagacccatgcttgggctgttgatgattgcatagataaccacgccaactacgcccagcaggaacagccagacggacgtttttgcaccggatttgatttcaatctgcttttcaccgcgcagttcaaccaggccctcttccagacgcttgcgataaatcggatcgtcagagagtttggagttgaacagcatagtgaccaggaaggacatcaccagaaccgccagcagggtggacgggatgaccacggagagcagatggaggtagctgatgccatgaccttccatcacggaagacatgtaaaccactgccgcactgattgggcttgcggtgatcgcaatctgcgcggataccactgcagtagacagcggacggcaaggtttaacgccttgttccttcgcaacttcagcgataactggcagtgtcgccagagagatgttgccagtaccagcaaagatagtcaggaaataggtcacgatcggtgcgaggatcgtgatgtatttcgggttacggcgcagcagcttttctgtctgatgaaccagatagtccagaccgccagcaacctgcatggcagaaatagcggcgataaccgccatgataatggagatgacatcgaacgggatgttaccgggtttaacgccaatagcggcaagaaccagcacccccaatccgcctgcaaaaccaatacctattccccccaatctggcgcccaagaagatcgccagcaaaactatgatgagttctacaactagcatattagccttccttgttttttaacaagttgatattagattgttatttttaagttactgctcacaagaaaaaaggcacgtcatctgacgtgccttttttatttgtactaccctgtacgattactgttcgctttcatcagtatagcgttttgctttgtaagccgggtgcatcagattctgtacggagaaaatatcgtcaagttccgcttcagtcaacagaccgcgttccagaacgacttcacgtacactcttaccggtttcggcacagattttacccacgatgtcaccgttgtggtgaccgatgaacgggttcaggtaagtaacgataccgatagagttgtaaacgtaaccttcgcacacttctttgttagcagtgatgccgttaatgcatttttccagcaggttgtagcaagcgttggtcagaatgtgaacggattcgaacatggcctggccaatgaccggctccataacgttcaactgcagctgacctgcttctgctgccatggtaacagtggtgtcgttaccgatgactttgaagcatacctggttaaccacttccggaacaaccgggtttactttagctggcatgatggaagagcccgcctgcagttccggcaggttgatctcgttcaggccggcacgtgggccactagagagcaagcgcaggtcgttacagattttggacatcttcacagccaggcgtttcagcgcgccgtgaaccataacataagcgccgcagtcagaggtcgcttcgatcaggtcttcagccggtacgcatgggaagccagtaacttcagccagttttttcactgccagcggagagtactctttcggcgtgttcagaccagtaccgattgctgttgcaccaaggttaacttccagcagcagttcagcggtacgttggatgtttttcacttcttctttcagcaggatgctgaaagcgcggaattcctgaccgagggtcatcggtactgcgtcctgcagctgggtacgacccattttcaggatgtcctggaattcgacagctttacgttcaaagccttcacgcagttggttaatcgcatctaccagcttaatcagggaagagtaaactgcgatacggaaaccggtcgggtaggcgtcgttagtggactgacatttgttaacatggtcgttcgggttcaggtactgatattcacctttttggtgacccatcagttccagaccgatattggccagcacttcgttggtgttcatgtttacggaagtacctgcgccgccctggtagacgtctaccgggaactgatccatgcattttccgttgttcaggacttcatcacatgcggcaatggtggcattcgctacacttttaggaatggtttgcagctctttgtttgccatagctgcggcttttttaaccattaccataccgcgaacaaattcaggaatatcactgattttgttgttgctgatatagaagttttcaatcgctctcagagtgtgaacaccatagtaggcatcagctggaacttccctggtacccaacagatcttcttcgatacgaatgttgttactcatgtgaaccttctttttcaagctgccaatgatttgctttaaacacacagaatatatgtggtttcgaatgtttttcgaccgacgattatcccctgcatcgaccgaatacccgagatcatatgctgcttgaggatttctaccgtaatctggatcactttaagtgtcggtttttaccccttaattattaatttgtgaaatagatcaccgctttgggattactaccaaaaatagttgcgcaaacatcttgaaattttgctaatgaccacaatataagctaaacgcgattcgcaacccattcaggtagccggggttaaccggctgctattacaggagaaacctttgcgctggttaccttttattgccattttcctttatgtctatattgagattagtatctttattcaggttgcccatgtattgggggtattgctgaccctcgtgctggttatattcacgagtgttatcggtatgagtctggtacgtaaccagggctttaagaatttcgtgctgatgcagcaaaaaatggcggcgggtgaaaacccagcggcggagatgattaaaagtgttagcctgatcattgctggtttgctgcttttattaccgggcttttttaccgacttcctcggtcttctacttttattgccgccggtgcaaaagcatctgacagtgaagttgatgccgcatttgcgcttttctcgcatgcctggcggcggttttagcgccgggaccggtggcggtaatacttttgatggtgagtaccagcgaaaggatgatgagcgcgaccgccttgatcataaagacgatcgccaggattaatgtcgaaacgccggattatgtggttatgccattttccggcgtttttcgttttggcagcaacagccataaccccgccagcatgatcagcgcatagagacttttccagccgaccattgccagtaacagaacgcataacagcccgccaaccaccgccagtagtcgataacgtccttgcaataatttacagcctgccagcatgcataacagataaatcataataaagatgccattggcataaataataagagcgtccagattgatctctaaagcatgaatcaccaaagtgctcaccacacagcagccgagcaccgcattgagggcattattcgggatatggcgagaagagaggcgtgccaggtagtggtcaggattatgttgcgcctggctccagaccaggcgggcgaagctctgtatataaatgttgagactggcaaagcaggccagatagccaatcacgcaggcaatccataacgctcctacaccgaacaactgcactacaatttttggaaggcttgctgccgccgccattttttcaccataggcgtcgaagtgtaagacgactaccgtacagccccagtagactaatcctgccagcagcagaccaatcatcaaagcacgaggaaaatcacgctctggatttttaaattcgctggcgagatgggcaaatgcctccagaccgacaaaacaccagaacatcacacttaacgcagcaaataacccggtaagttcgatattaccaggtgccggaaaggggatattcgcaggtttgatatcgcccgcccaccagatagcgacaatcagcgcgacgataagtccggcaataacggtttgtagattagcactggaactggcaccgcgagtaccgatataccacaccagcgccagcgtaccgagttctgccaacaacagttgccagctatgccagccaaacatcgcctggccgaacccggcggcaatttgtagtgcggcaggcaaacccacgggaatgacgcttaaaaacagccagccggtgactcgctcaagccggctaccaaacgccataccgacgaagtgcgcgacgccgcctgcgctgggatagtggcgacccagaatcgcaaacacaatcgcaatcgggaacactaagataatcaaaacgggccacgcccacaggctgttattgcccgctaccagcgcagctaacgcaggaacggcaaacacgccagtgcctaataaactcgtgcttagcaggccaatgccctgggccagccccagttcttgtttgagtccactcatgggttgatgtccgattgcgcccaaattttgggcaactgcgtagattttcgatggtagcacaatcagattcgcttatgacggcgatgaagaaattgcgatgaaatgtgaggtgaatcagggttttcacccgattttgtgctgatcagaattttttttctttttcccccttgaaggggcgaagcctcatccccatttctctggtcaccagccgggaaaccacgtaagctccggcgtcacccataacagatacggactttctcaaaggagagttatcaatgaatattcgtccattgcatgatcgcgtgatcgtcaagcgtaaagaagttgaaactaaatctgctggcggcatcgttctgaccggctctgcagcggctaaatccacccgcggcgaagtgctggctgtcggcaatggccgtatccttgaaaatggcgaagtgaagccgctggatgtgaaagttggcgacatcgttattttcaacgatggctacggtgtgaaatctgagaagatcgacaatgaagaagtgttgatcatgtccgaaagcgacattctggcaattgttgaagcgtaatccgcgcacgacactgaacatacgaatttaaggaataaagataatggcagctaaagacgtaaaattcggtaacgacgctcgtgtgaaaatgctgcgcggcgtaaacgtactggcagatgcagtgaaagttaccctcggtccaaaaggccgtaacgtagttctggataaatctttcggtgcaccgaccatcaccaaagatggtgtttccgttgctcgtgaaatcgaactggaagacaagttcgaaaatatgggtgcgcagatggtgaaagaagttgcctctaaagcaaacgacgctgcaggcgacggtaccaccactgcaaccgtactggctcaggctatcatcactgaaggtctgaaagctgttgctgcgggcatgaacccgatggacctgaaacgtggtatcgacaaagcggttaccgctgcagttgaagaactgaaagcgctgtccgtaccatgctctgactctaaagcgattgctcaggttggtaccatctccgctaactccgacgaaaccgtaggtaaactgatcgctgaagcgatggacaaagtcggtaaagaaggcgttatcaccgttgaagacggtaccggtctgcaggacgaactggacgtggttgaaggtatgcagttcgaccgtggctacctgtctccttacttcatcaacaagccggaaactggcgcagtagaactggaaagcccgttcatcctgctggctgacaagaaaatctccaacatccgcgaaatgctgccggttctggaagctgttgccaaagcaggcaaaccgctgctgatcatcgctgaagatgtagaaggcgaagcgctggcaactctggttgttaacaccatgcgtggcatcgtgaaagtcgctgcggttaaagcaccgggcttcggcgatcgtcgtaaagctatgctgcaggatatcgcaaccctgactggcggtaccgtgatctctgaagagatcggtatggagctggaaaaagcaaccctggaagacctgggtcaggctaaacgtgttgtgatcaacaaagacaccaccactatcatcgatggcgtgggtgaagaagctgcaatccagggccgtgttgctcagatccgtcagcagattgaagaagcaacttctgactacgaccgtgaaaaactgcaggaacgcgtagcgaaactggcaggcggcgttgcagttatcaaagtgggtgctgctaccgaagttgaaatgaaagagaaaaaagcacgcgttgaagatgccctgcacgcgacccgtgctgcggtagaagaaggcgtggttgctggtggtggtgttgcgctgatccgcgtagcgtctaaactggctgacctgcgtggtcagaacgaagaccagaacgtgggtatcaaagttgcactgcgtgcaatggaagctccgctgcgtcagatcgtattgaactgcggcgaagaaccgtctgttgttgctaacaccgttaaaggcggcgacggcaactacggttacaacgcagcaaccgaagaatacggcaacatgatcgacatgggtatcctggatccaaccaaagtaactcgttctgctctgcagtacgcagcttctgtggctggcctgatgatcaccaccgaatgcatggttaccgacctgccgaaaaacgatgcagctgacttaggcgctgctggcggtatgggcggcatgggtggcatgggcggcatgatgtaattgccctgcacctcgcagaaataaacaaacccccgggcagaaatgtctgggggtttttcttttggtcatctttctagtataagattcagacacggacgacgcgagtggcgtccagctcattgattatggggaataacatgcacgtaaaatacttagcagggattgtcggtgccgcgctactgatggcgggttgtagctccagcaacgaattgagtgctgccggtcagagtgtacgcattgtggacgagcagccaggcgcagagtgccagctgattggtactgcgacaggtaagcaaagcaactggctttccgggcaacacggagaagaaggcggttctatgcgcggcgcagcaaacgatctgcgcaaccaggcggctgcaatgggcggtaacgtgatttatggcatcagtagcccgagccagggaatgttgtccagttttgtcccgacggatagccagattatcggtcaggtttataagtgcccgaactgatgtgatccagaggctgggtgacaaacgtataattgcctgatgcgcttcgcttatcaggcctacataaggcattgcaactgattgaatgcttgagaatttgtaggccggataaggcgtttacgccgcatccggcatgaccaacgatcacgttatcagtcatttcaggctggatggctccagcctcgcattagcaaagatgagattatttcgcctgtggtgcagttttgctggtggattgaacacgtaagtgatgcagcgcgcgtaagcattgatcctgggttagcggttgggcgttattcgccgctacggtgcgaacatagacctgacatggcacacccgcgagttttttcagtcgtgggctgaaatcaagcattcggcgagtgatcgcttctatttctttacccggcgttgcttcacgcgttttcaccactgcgccgctaaattgttctttgccactttcatctttaaagcggtaaagcaccgccagataatggtcgaacaagttatgtttccattccggttgggaataggtgtcatattccagattgccattgtcctggcagtcaacgtcgtataacggcaggaaatctaacagactggtaatacgtaatgccagttcacgcatttccgcattattaattgcatgaatgattgctcgcgccagcatttcaatctgcaactcattgacgactaactcacatttgctaccgtcatgtagcgttaatacgaaggtaagattttcgccttgattatcggtaagttccagcgtgttaacccgacgattaatatcggcatttttaagctcatcaaccagaatttctgggatgttttctgccattttcttaatgactttatcgcgagcttgctcatactgaaggtgtgcagcagcatccagtttatgcttttgatgcagacgactttccagcgcaatcagcaggtcgcgcagttccatgacagacataaagaacaagctttctttattgcgaggttctttaattttcagcgccagtgcaatgaaattattactcttgcgaataacaccggtattaacacccttgatgcttatggccatgtaggttctccctaaccatttctcaattaaataattaattttaatttataagccagataaatgggcttggtagtaatagttgttaaaataacataaatagccgtactcactctatataaacagaaaagaaaggttaattattggtgttagctatataaaaagtaacaacagcaatgcatatgaataattaaaggttatgcaacgggcaaagattaaacttcccagtttaatgacaggttgctgtacttgcgtttgttgctcttgccggatgcagcgtaaacgccttatccggcctacagttcattgcaaatccattcaatttcaatgcacgatgtaggcctgataagcgtagcgaatcaggcaattttaatgtttaacttccctgtttaatcagttactgctggcgtagctggagatccagcggcgttttgctgggttcgccgccaatttctcgcgccagtttcggcaccagatatccgctcaccagtgtcagcaactcacgcataatctgccgtgcttcgtcatcactcaccataaaatgcgccgcgccctgtactttatcgagcacatgcaggtaatacggcattacgccggcatcgaacaacgcattactcaggtttgccagcgtttgtgcgttatcgttcacatcacgtaacagaacgctctggttcagcaaagtaacgcctacccggcgcaacttagccatcgcctgacggaatgtttcatctacctcattggcatggttgatgtgattcaccagcaagatttgcagcgtagaacgggcaaagcattcaaccagcgcctcggtgatacgtgccgggatcacaatcggcagacggctgtgaatccgcagacgttttatatgcgggatggcttccagttgtgtgagcaaccagtccagctcgtgatctttcgccatcagcggatcgccgccggagaaaatcatctcgtccagttccggatgcgcagcaacatactcaagtgcagtttgccagttacgcttgttgccctgattttcggcataggggaagtgacgacggaagcaatagcggcaatttaccgcgcagccgcctttgaccagcaaaagcgcccggttgtggtatttatgcaacaaaccaggcactacgctgtgctgttcttccagtgggtcggtggagaatccgggcgcgatgacaaactcatcttggctggtaagtacctgacgcaaaagaggatcgtccggattgcctttctccatgcgatcgataaaactgcggggcacacgcagggcaaaaagctttttggcgctgcgtccggctaacagtttttcctccgcgtctatattcaaaagacgcagaagttcatcaggatcggtcacaacatcggcaagttgcgttaaccaatcttctctggatggggtatttagggttacaatatgcgccattttgtggcttagctaccaattaacaaatttcagagggccttatggcaacgtactatagcaacgattttcgtgctggtcttaaaatcatgttagacggcgaaccttacgcggttgaagcgagtgaattcgtaaaaccgggtaaaggccaggcatttgctcgcgttaaactgcgtcgtctgctgaccggtactcgcgtagaaaaaaccttcaaatctactgattccgctgaaggcgctgatgttgtcgatatgaacctgacttacctgtacaacgacggtgagttctggcacttcatgaacaacgaaactttcgagcagctgtctgctgatgcaaaagcaattggtgacaacgctaaatggctgctggatcaggcagagtgtatcgtaactctgtggaatggtcagccgatctccgttactccgccgaacttcgttgaactggaaatcgttgataccgatccgggcctgaaaggtgataccgcaggtactggtggcaaaccggctaccctgtctactggcgctgtggttaaagttccgctgtttgtacaaatcggcgaagtcatcaaagtggatacccgctctggtgaatacgtctctcgcgtgaagtaatgcggttgtggtgcggcctgcaggctgcaccatcacttattcaggtcagagatgatgaaacgccttatcgttcttgttttgcttgccagcacgctgctcacgggctgtaacaccgctcgcggtttcggcgaagacatcaaacatctcggcaactccatctctcgcgctgccagctaatttttcttctcttccgaaaaatcatcagattcccatcatttttggcgatgttgtctattattaatttgctataggcaaacataaataacattacctaaaaggaagacgttatggtgaagaagacaattgcagcgatcttttctgttctggtgcttagtacagtattaactgcctgcaacaccacgcgtggcgttggtgaagacatttctgatggcggtaacgcgatttctggcgcagcaacgaaagcgcagcaataagcaataacggtacgacagctgtgtcgtgccgtttgttttttctgcgatagtcacaaaggtaatagttgaaattcccctgccacctggcaaaatatccgttcaaccatcagctttgcaggacgacctgcaaacgcctcttttcaccggggacggccccaattctccggagcctgatatgtcctggattatcttagttattgctggtctgctggaagtggtatgggccgttggcctgaaatatacccacggctttagtcgtttgacgccgagtgttattactgtgacggcgatgattgtcagtatggcgctacttgcctgggcgatgaaaagcttaccagtagggacggcttatgccgtgtggacgggtattggcgcagtcggcgcggccataaccggcattgtgctgctcggtgagtccgctaacccgatgcgcctggcgagtctggcgttaatcgtattggggattattggtctgaaactcagcactcattaactaccaggctgctgtacccaaataaatttactgacatcaaacccttcccgggtcgcgactgccagcatctcctgtttcacttcgtcagaaatggttggcgtgcgggagagtatccacaggtagtcgcggtccgggccgcaaaccagcgcatggcggtattcccgatcgagtgcaataacgttataaccgccatagaaaggaccaaagaaactcactttcagcgcagcgcgagttggtgcgccggtaaagtacgctttcccttcactctgctgccacattcctctgtcagggttatagcctttattaatgacattcaggccgccgtcatcacgcaggctgtatgttgcggtgactttttccagtccacgttcaaagcggtgatcaaaacgggcaatctcataccaggtaccgagataacgtttggcgtcgaaattatttactacggtcacgccacgcggcggcgtaggagaactgcaggcaacgaccagaaatgcagctgtcgctgcggcaacgagagggagcaggcgcataaatgtttccttactggtttttttctaagtgtagatgacagcaaggaaaagcggagaaaaggtccgaaaattcggacccgatggaattttactgtagagcgttaagaatctgccaggcggcgtcgactctcgctggattgggatagtttttgtttgccagcatcacgatacccagctctttttctggaataaacgcgacatagctaccaaatccgccggtcgcccctgttttatgtacccaacttgcgcgtactgcaggagttgggggcgtaatcgcttttacggggcgtgctgccagtgcaattttattgtcactgccgttaatgatgctgtcaggatttaccggccagtccagcatttcccagcccaggccctgatacatatcgccggtttgccagtagcgagattgtgccagttgtatcccttgttgaagcgttttctcattgatatcaaggggttttaaattgctttgcacccagcgggccatatcttcaatggtgctcttcacaccataagcttcagcatctaacgccccagggctaacatgcactgccttaccttcgcgatatccccaggcgtaattcttttcttctgcgggcggtacattaatccacgtatggttgagtttgagtggctggaagacacgagtttgcatcgcctgctcaaaactcaaaccagacggcttcacagccagtgcgccgaacaaaccgatactggagttggcatacagacgttgtgttcctggagcccatgcaggctgccagttttgatagaagcgcagcaagtcgctactggatttcacctcatccggcacctgcaatggcaggccgccagcagtgtaggttgcgagatgtaatagtgtgatcccattccactgtttagcggtaagttcaggccagtattttgttgtgggatcgcttaacttgatttcccctcgagcaatagcgtcgccaccaagcacgccagtaaatgttttgctgacgctacctaactcaaacaacgtttgctgtgtgacgggctgctttttggcgatgtccgcatagccccaggtaaagtaataaggtttaccctgataaattaccgccaccgccatacccgggatcttttgttgctctataagcggggtaattgtgcgatgcacaatatcgttgatttgttgaggggcagcaaatgtggagcaagaggcggtaattaataaggcgcagagcgtcgttttgaacatagggtctggtttccatacaaaacggcccgccataggcgggccggatttacattggcgatgcgttagattgtaacgacaccaatcagcgtgacaactgtcaggatagcagccagaccgtagaaaacccatttgcccgcaggtacgtggattttcagatcgtgcatcgcgtggtgcatacggtgtaaaccacaccacagcggcagaacgatcatcaggaacaggaatacgcgaccaatgaagctctgcgcgaacgccagaacgcgctcgtagctcagcgcatcacccggaaacaaccccagtggcagcagaatacccaccagcaggatcatcaccggcgcaatgatggcgctccacataccaccggccccgaagaggccccagaataccggttcgtcagaacgctttggatttggattaatcatctcaggctccttaccagtacagggcaacaaacaggattacgatggtggcaaccacagttaccgcccagagacttttgataattggctctggtcccattttttcgtcttttacaatgatattggccgctttcggtgccagttcaaaccaggttttggtgtgcagcagagctgccgccagagtgatcaggttaatgatcacgataaccgggttttgtaaaaagtcgacgaatcccgcccaggcttccgggccatttttcagggcaaacagcccgaaaatcagttcaatgctgaaccacacagccggaaccgccgtgccttcgcgcagcatgtaaaagcgataaaacggcaattttttccaccaggtggacgtcattggccgtacatacggtttacgtttagtcgtcatgttgcactccttagcgtggtttcagggtcgcgataagaaagtctttgctactttctactttgccctgctgaatggccgcagccggatcgacgtgtttcgggcagacttcggagcagtagcccacgaaagtacagctccatacgccgttctggctgttcaactgcgccatacgctccttcttaccgtggtcgcggctatcttcgttataacgatgcgccagcgtaatggcagccggaccgatgaactctgggttcaggccaaactgcgggcacgcggcgtagcacaaaccacagttgatgcaaccggagaactggtgatacttcgccatctgcgccggggtctggatgttagtaccctgatccgcggtgcgggagttgccgatgatgtacggtttgatcgcttccagactttcgatgaagtgggtcatatcgaccaccagatcgcgttcaatcgggaagttagctaacgcttcaaccttcataccgtcggtgtaatcacgcaggaaggttttacatgccagttttggcacgttgttaaccatcatgccgcaggaaccacaaatcgccatacggcaggaccagcggtagctcaggtccggtgccaggttgtctttgatgtagcccagcgcatccagtaaactggtagttgcgtcataaggcacttcatagaatgcgctatgcggtgcggtatcgacttccgggttatagcgcaccacctcaattttcaggtttttcatctcagccattcgccttctccttcttattggctgcttccgccttatcggctgcatccgcttcgccaccgtaaacgcgtttagctggcggcagcgtagtaatcttcacgtcgctgtactccaggcgagtcgtgccatcagcatcgcggaaggcgagggtgtgtttgaggaagttgacgtcgtcacgctcggtgcaaccttcgtccagacgctggtgcgcgccgcgggactctttacgtgccattgcggagtgcgccatacattcagcaacgttcagaccgtggcccagttcaatggtgtagagcaggtcggtgttgaacacgctggaagtgtcggtgatgcgcacgcgcttgaagcgttcctgcagctctgccagcttgtcgatggttttctgcatcagttccggcgtacggtagataccgcagccttcttccatagccaggcccatttcgtcgcggatcttcgcccagttttcgccgccatcctggttaaccagatctttcagacgttgttcaacgccagctgcctgcgcttcaattgccgcttcgttgccattaccggcagttgctgcacgctctgtcgcttgttcaccggccagacggccgaagaccaccagttccgccagggagttagaacccagacggtttgcaccgtgcagaccaacagaggaacattcacccacggcgaacagacctttaatgcgggtttcacagttctgatcggtttcgataccgcccatggtgtagtgtgcggtcggacgtaccggaatcggttctttaaccggatcgacgccaacgtacgctttcgccagttcgcagatgaacggcagacgttcatgcagttttttctcgccgaggtgacgcaagtcgagataaaccacatcgccacgcggcgtggagatggtgttgcctttacgccattcgtgccagaaggcctgagagactttgtcgcgtggacccagttccatatatttgtttttcggctcgcccagcggagtttccgggcccatgccgtaatcttgcagataacggtagccatttttgttgaccagaataccgccttcaccgcggcaaccttcggtcatcaggataccggaacctggcagaccggttgggtgatactgaacgaattccatgtcacgcagcggaacgccgtggcttagcgccatacccataccgtcaccggtaacgatgccgccgttggtgttgtaacgataaacgcgacccgcaccgccagtagccataacgaccgcgttagcacggatctgcaccagcgtgccttccatcatgttcattgctaccaggccgcgaacatgaccatcatcaaccagaatatccagcacgaaatgttcgtcaaaacgctggatctgcgggaattgcagagaggtctggaacagcgtgtgcagcatatggaagccggtcttatcggcggcgaaccaggtgcgctcgattttcatgccgccgaagcgacgtacgttgacgctaccatccgggcgacggctccatgggcatccccacagttccagttgggtcatttcggttgggcagtggtggacgaaataatccacgacatcctgctcacacaaccagtcgccacccgctactgtatcgtgaaagtgatattcgaagctgtcatgatcctgcgcgacagcggcggagcccccttctgcagcaacggtatggctacgcatcgggtatactttactgattagtgcgatttttgcattcggatttgcctgcgcggcagcaattgcagcacgtaatcccgcgccaccggcgcctacaatggcaagatcggcttgaaaggtttgcacgacattcctccagattgtttttatcccacagccacgtacttcagggtaagtacctgaaagttacggtctgcgaacgctattccactgctcctttataggtacaacagtatagtctgatggataagtctgaaatttgacgagatcgatttttttagtgcgcaagagggctaaattatcactgaagatgattaatttaattactaaaccatcagatcgtgctttttttagtcactgcccaccgctgtttgattcctgcgtaaaatttgtctcgccgtcgcgttgcgagtagacttcgtgcccttgtcaaaaactggagatttaactatgagcgaaacggcatcctggcagccgagcgcatccattcctaacttattaaaacgcgcggcgattatggcggagatccgtcgtttctttgccgatcgtggagtgctggaggtggagacgccttgtatgagccaggcgacggtaaccgatattcatttggtcccgtttgagacacgtttcgttggccccgggcatagccaggggatgaatctctggttaatgaccagcccggaataccatatgaaacgcctgctggttgccggttgtgggccggtattccagctgtgccgcagcttccgtaatgaagagatggggcgttatcacaaccctgagttcactatgctggagtggtatcgaccgcactatgatatgtaccggttgatgaacgaggtggacgatctcttacaacaggtgctggactgcccggcagcagaaagcctttcttatcaacaagctttcttgcgttatctggaaattgacccgctctctgccgacaaaacgcaactgcgggaagtcgcagcgaaactggatttgagcaatgttgctgataccgaagaagaccgcgacacgctgctacaattgctgtttacctttggcgtagagccaaatattggcaaagaaaaaccgacctttgtgtaccactttccagccagccaggcaagtctggcgcaaatcagtaccgaagatcatcgggtcgctgaacgctttgaggtttattataaaggtattgagctggcgaatggtttccatgaattgacggatgcccgtgagcagcaacaacgctttgaacaagataaccgtaagcgcgcggcgcgcggtttgccgcagcaccccattgaccagaatctgattgaagccttgaaagtcggtatgcctgactgttccggcgtggcattaggtgttgatcgtctggtgatgttggcgctgggcgcggagacactggctgaagtcatcgcctttagcgttgaccgggcataattctgaaaaattactgaattaacagcgaagaatggcgtgataagcgccattctgtagcatatgttttcatttttccgttaaaggccacaatttaagactggatatttgatatcatccaggtatcaattctgtattggtttttacgctgcctgctcaatgttgcgcagtgcagttcagtgggcacgtgttatacacgcgctgaaatgaaggatggtttcatgcctcacacgataaaaaagatgagtctgataggactcatattgatgatctttacttccgtatttggatttgccaatagcccaagcgcttattacttaatgggttatagtgcgattcccttttatatattttctgcattgttattctttattccattcgccttaatgatggctgaaatgggagctgcttatcgcaaagaagaaggcggtatctattcctggatgaataatagtgtcggaccacgttttgccttcattggtacgtttatgtggttttcctcttatatcatctggatggtgagtacctccgcgaaagtttgggtaccgttcagtacattcctctatggtagcgacatgacccagcactggcgtattgccggactggagcctacgcaggtggttggtctgctggctgtggcatggatgattctggtcaccgtcgttgcttctaaggggattaataaaattgcccgcattactgcggtgggcggtattgcagtaatgtgtctgaatttagtattgctgttagtaagcattactattttgttattaaatggtgggcatttcgcgcaggatattaatttccttgcaagtccgaacccgggttatcagtccggtctggcaatgctaagctttgtggtatttgccatttttgcctatggcggaattgaagcggttggtggtctggtcgataaaacggaaaatccagaaaagaactttgccaaaggtattgtttttgccgctattgttattagtatcggttatagcctggcaatatttttatggggcgtcagcacaaactggcagcaggtattaagtaatggttccgttaacctcggcaatattacctatgtgctgatgaagagccttgggatgacgctgggtaatgcactgcatttgagtcctgaagcgagtttgagcctgggcgtatggtttgcgcgtattactggacttagcatgttcctcgcctataccggtgcgttctttacgctttgctatagtccgttgaaagccatcatccaggggacgccgaaagcattgtggccggaaccgatgacgcgcctgaatgcgatggggatgccgtctatcgccatgtggatgcagtgcgggttggttactgtcttcatcctgctggttagctttggtggcggtaccgcaagcgcgttctttaacaagctgacgctgatggcgaacgtgtctatgacgcttccttacctgttcctcgcgctggctttcccgttctttaaagcacgtcaggatctcgacagaccgtttgtgattttcaaaacgcatttgagcgcaatgattgcgacagtggttgtcgtactggtggtgacatttgcgaacgtcttcaccatcattcaacctgtggttgaagccggagactgggacagcacattgtggatgattggcggccctgtcttcttcagcctgttagcgatggcgatttaccagaactattgcagcagagtggcaaaaaatccgcagtgggcggtggaataacccgatgccctatcgtctacctgacgatagggcgtaaagacaggaaatgttatggatgacaccagccgggacccggcaataaccgaagatgaaatcagggcgctgcaattttctgccggggatgtagcggaaatagagcagacgattctctcttttgtcgatgcctgccacacccgtaaagtggcgatggtggtgggtagcaccattaacaccctcaaagatcgcgatggtaaacggtggggaaacctgccggatatttattgcgcttatcttatccgatgtctggtttttcgcggggaattagtgggatacggcgatttgtttcgtatgcgctatagcgaaattaagcgaccggttaccttatgagtgcgcgcatgtttgtcttatgctgcatctggtttattgtggcgttcctctggataaccatcacttccgcgctggacaaagagtggatgattgatggacgcgggattaacaacgtctgcgatgtgttgatgtatctcgaagaagacgatacccgtgatgttggtgtgataatgacgttaccgctctttttcccttttctctggttcgctttgtggcgaaaaaaacgcggctggtttatgtacgccaccgcgctggctattttcggctactggctgtggcagttttttctgcgctatcagttttgtttgtgagccggattggttcatccggcacacaaacttacaaacttcccgcctgacgacctttgcccgcagacgtcagcgttctccccgtttgtttaccgttgaggctttccagacgcatctggaagggcgggaatggcatatcgataccgtgggcatggaagccagccagaatcagctggtggatctcatggcgtagcggcatacggtgacccatctcagcggcgtaaatacgcagctcgaaaatctgaatcccctgttgcagatccaccaggaagacttccggtgccgggttgtcgatcaccaggctgcagcgacgcgctgcggtgagcaggatttccgtcacttcttcgctattggcatcggcaggggccggtatcgtcaacaccacgcgcgtgacgctgtcagagaggctccagttgataaactgctcggtaataaacgccttgttcggcacgattatctctttacggtcccagtcgctgatggtggtggcgcgggtgttaattttcgtcacgctaccggtgagatcgcgaattgtcaccgtatcgccaatgcgaatcggtttttcgaacaggataatcagaccagagataaagttggcgaaaatttcctgcaaaccaaaaccgagaccaacaccgagcgcggcaaccagccactgcaatttgctccactcaataccaatcatactgaagccgaccagcccgccaatcagcatcagcagatatttggtgatggtggtgatggcgtaacccgtacccggcgttaaatccaggtgctgcaaaatcgccagttccagcagcgcgggcaagttgcgcaccagctgcgtggtgatgataaacaccagaatggcaatcagcaccgcaccgagggtaattggctccagactttctacgccctgtaccgtggaggtgacatcccacaggctaatattttcgaggaagccgaaagcggaatggatttcactccacagcacaatgacagaaagcagggcgatcaacatcaaaatactgcgcaccagccgcaaggattgcgcactgatggcatcgagatcgacttcgctttcatcgacttcaattgctccttccgggctactgtgatgatgcgcttcctcttcgccacgcgcacgttgcgctaacatctctgcccggcgatgcttcgcccgatcaaacgccagcctgcggcgctggatcagcatccagcggcggataacgtgataaaccaccagtagcaggaaccagatggcaacgctggtttcaagcctcgctaacagcgcctgtgccgttgccagataacccaccgcgctcgccagaatggcaaccaacggcgcgccaatcatcatgttccacagcatatggttggtaatgttgtcgccgctgccctctttgttgagatacagcggaatcccggcctttttcaggctgagggtgaccaccgccagcgcaccgcaaatgaggataaagcaaagccgtcccaggctaccggagaattcacggtcgtcgaggttatcgaacatcatcagcgccataatcagcggcacaataagcccgatgctcatcaggtagtagcgcatcccacgggaaacacgttcgcgcggccagccaaaatgagcgataaacaagccgttcgggcgggcaaaggtggcgcaaatcatcactacccacagcagcggcacggtggccgttacaccatcgccaatcgcgaccgccagcggataaggccacgcctcgcgcaagccgtaacccagcgtcatccacagcaccggtaacggactcgcgacgagaatgctccagaaaagagtgcgcaacgtcagccagaagtgatcctgagtcactttgccaactttcgccgcgctacgttcaagaaaacgggtgaaatagcggcggctgtaaatactgcaaccgaccagaatcaacgcgccaaacagcggcaaaattgtctctttgctggtcagcatcatcacactggctttgcccaactgactgaaggtgtccaggctaatgagacgacgcagatcctgggcgatttccagcggccaggcgatggtcatcgggcgcacgtcagaggtccagaacagatagcggtgcgttgcttcgttcacctctttcagcgcatcctccagttgcccgttggagactttcagcttggtcagttccaatagtagcgtgtcgccaccctgcaacaaactgttcagcaactcacgctgagtgcgcagttgtgcttccagaatacggttttgctcggcagtcagcggctgaccgtcggcctgatgaatttgccgtagcagcggctgtttattaagcagatcctcataacgtaaccgttgcacacgcaactgcgccatttcggtatcaagctgttgtggtttcggcatttccggcagccgtgccacctgcgcccgcagcgcttcgccgagcagattggagcttcccagccattggctctgttcacgcagcgtattcaacgcctgccggacctgtaacgtctggctggcagcctgacgctgttggctggcaacgagatccatccgctgcgcctgttgattcaaagccgcgcttagttcgcggttaattttgaattgcgcgacgatatctttcggcaaatcggcgctgttttctgccagcaattcggtactttccagcgcccgctccgcctcaagctgacgttggctgtttaattgattacgcaaggcctgcaaatacgcatccagttgctggctctctttttccgccagctcactgcgtaagcgcgctaattcctggcggttattggcagacagctgcgccagctccagttcatcaacgagcgccttaagacgtgcagagtcagactgcaacgcgaaattttgtgcctgattgagcggagtattgccggtaagcgttcccaggcggcgctcgatctcatttaactgacggcgggcgtcggtttgctgttgcggcagttgattcaggctatcggcaatctcgcgggcgcgctcctgctcttgctgggcctgacggcttttatccagcaactggctgctgacctggagaatttcctgattcagcgcgtcggtagacattcccgggctcacgctgcgcggctcgtcacgcatgttgtttaattgtgcgcgcagagtagcggagagtttcggataattatcgataacttgctgatattgtttgatgcgctcaagggaaccttttcgttcctcaagcgcatttaaggcagactggagcgcctctacgacttccggctgtgcgggtttcgccgcttttgcctgctccagttcctgagtgatttgtttgctatcgggggccgtcgcggcgtacgccccccaactgaggcaccaggccatcagaaaagtgataatcaggcgcacgtcagcgtttcctttgatggattagacctggtcttttttgtcgtcaaccaatgggctggcgtcgtgttctgcttcgatctcttcagcaggaagcggggcaggttcagcgtctggcgtaacaaaggtttcggtagatactgccagcggctggccaattttcgtgacagacaggctttccagttgctcaaccagattcactttacccggtgcaaacaggttgataacggtggaaccgagtttaaagcgacccatttcctggcctttcagcagtgccacagaaccgtcgttttccccggcaggccaggtccagcgcttgatgataccttcgcgcggcggcgtaatggtgcccgcccagaccgtctcaatgctgccaacaatcgtcgctccgaccagaatctgcgccattgggccaaattcggtatcgaaaaggcaaatcacgcgttcgttacgggcaaacagattcggcacgttctgagccgtgagatggttaacggagaagagatcgcccggcacgtagatcatctcacgcagaataccgttgcacggcatgtgtacgcggtggtagtcacgcggggagaggtaagtggtcacaaacgtaccgttgcggaacaggtccgccatcagatagttgcctgccagcagggcttcgaggctgtagttgtggcctttggcttgcaggattttatcttcttcgattttacccaactggctgataacgccatcggcaggcatgaccagtacattcggatcggtatcgattgggcgtacttcgtcacgcagcggacggacaaagaattcgttaaaggtgcggtagctggcggtgtccggcttttgcgcctctttcatgtcgaccttgtagtatttaacgaacagatcgataaccagttttgtcagccatcctgcccgcttgcttgcgccccaacccgccaggcgagtaagccatagtttcggcagaatgtactgtaggctaagtttaaaactatttaacaaggtagcctccaggccattgttttgtcgttcctgatccggcctacatgccggatcctgaaaaaaaggggacgattctaacgacggttagcttaattgtcagtcatccgtatcagaaaagtttttacgcgtttttacctgcgccatgctttccagaatacggtgatagttttcgaaacgggtttccgcgattttcccttcctcaaccgcttcccggatagcgcagcccggatcggtatcgtgtttgcaatcgcgatatttacacagacctaaatagtcatggaattcgacaaagccctgagtgatttgttccggctccaggtgccagaggccgaactcacgcactcctggggagtcaatcacatcaccgccgtgcgggaagtgatacagccgagcggcggtcgtggtgtgctgaccgagcccgctgttgtcagagatatcgttggtcaggatctctttttgcagccccagcaacgcattcagcaggctggatttgccgacgccagactgcccggcaaaaatgctgatgcgcccggtcaacgcctcttccagcggttttagcccatcctgagtatggctggaaaccatcaatacgcgataaccgatattgcggtagatatccatctgctcgttgacgaacgccatgccttcgtcgtccagcaggtctatcttgttgagcacaataatcggctcaatctgcaaggtttcgcaggccaccaggtaacggtcgataatattgaggctcagctccggcaaaatggcggagacaatgacaatctggtcgatgttggcggcaataggttttacgccgtcgtagaaatccggacgcgtcaacacgctggtacgctcatgcaccgcttccacgatccctttgacatttacgccttccgccgccggtttacccggacgccagactacgcggtcgccggttaccaggctacggatggtacggcgaatattgcagcggtgaacgtcgccatcggcggattccacatcagcgtgcataccaaagcggctgatgacgataccttcatcaggctcgccaaacagattgtcgtcgtagtcgggcttctccttagacgttttaagacgacgctggtgattggcgttcacgcggcgctgctggcctttggagagtttatttttactcaatcgtacagactcctggtcgcccctgatgggcaaaacatctatgatacacgcaattgtggatcaatatagtcactgtgaatgggtggaaaatagcatgagtgccaatgaaaacaacctgatttggatcgatcttgagatgaccggtctggatcccgagcgcgatcgcattattgagattgccacgctggtgaccgatgccaacctgaatattctggcagaagggccgaccattgcagtacaccagtctgatgaacagctggcgctgatggatgactggaacgtgcgcacccataccgccagcgggctggtagagcgcgtgaaagcgagcacgatgggcgatcgggaagctgaactggcaacgctcgaatttttaaaacagtgggtgcctgcgggaaaaagcccgatttgcggtaacagcatcggtcaggaccgtcgtttcctgtttaaatacatgccggagctggaagcctacttccactaccgttatctcgatgtcagcaccctgaaagagctggcgcgccgctggaagccggaaattctggatggttttaccaagcaggggacgcatcaggcgatggatgatatccgtgaaagcgtggcggagctggcttactaccgcgagcattttatcaagctgtaaaatttttcctggtcacgtaagcgccggaatccacttgcggcggcgtgattttgacgctaaattgaacgtcttgctgataatttcagcacttgagataaaaacgcaaaaaaaacttttttggggggttgcagagggaaagatttctcgtataatgcgcctcccgtaacgacgcagaaatgcgaaaattacgaaagcaaaattaagtagtacgcgggaatagctcagttggtagagcacgaccttgccaaggtcggggtcgcgagttcgagtctcgtttcccgctccaaaatttgaaaagtgctgcaaagcacagaccacccaagcgggaatagctcagttggtagagcacgaccttgccaaggtcggggtcgcgagttcgagtctcgtttcccgctccaaaatttgaaagtgctgtaaggcacagaccacccaagcgggaatagctcagttggtagagcacgaccttgccaaggtcggggtcgcgagttcgagtctcgtttcccgctccaaattcttctctcaataaaatatccacagcgacgcgatgcgttattgctggtttttgttgtctctgacaaactcttgtaaacagagttatccacagcctcaggctgtaatcttaatttcaaagaaacttcgcacggtgaatagtatttttttaacctattgatagataagttaaaaattaagattccgttttgtcgagtcgatcacttgacgattttattcgtcttgaattgcaatgcgtttttatttttattcacaagctgtggatgaatcaggcgtcacgcggtaaccctttttcaatcacccgaaccagacgctgttttttcggcaattgcacttcgactatgcacgcatttcgtctctctatttgctgcgcaatcgcccacgctatgtgctcatcgagaagtgggtgctcacctttacgactttccagcgctgtcaaaatcgtttcatcccaaggggcattgcctaatgctacggcgatattacgcagccaacgcaggtgaccaatacgacgaatcgcgcttccttccgtgacttttaaaaacttctcttcgctccaggcgaataactcaatgagttccggtgcgtgtagcggcttacgcgggctgaaatcctcttctgtggtgagttgactatagcgattccacgggcagataagctggcagtcatcgcaaccgtaaatacggtttcccattaacggtcgcaactcttccgggatcgccccttcaagttcgatggtgagataagagatacagcggcgagcatcgacggtatatggctcgacgatggcaccggtcgggcaaatcgtcatacaggccacgcatttgccgcatccttcctcgactggttgatccacgggcagcggaatatcgaccagcaattcgcctaaaaagaagaagctaccggcctcgcgattgaggataagactgtgcttacctgtccagccgagcccagctttttcagctaacgggcgctcgagaataggcgcagaatcgacaaacggtctaaaattcaggctaacacaatgttgctgaatcatctcgcccagctttttgagtcggttgcgcagaagtttgtgatagtcacggcccagcgcataacggctaacatagccgagtttggggtttttcagcgtgctggcaaatgcggcgttagcaggaaggtaattcatccgcacgctgatcacgcgcagcgtaccgggcaataactcatgagggcgagcgcgcagcataccgtgacgtgccatccagtccatttcgccgtggtattgtttgtccagccatgcttgcagtttgggctcggactcgctgagatcggtatcggtaatacctacctgctgaaagcccagttccagcccccactgtttaattttttgcgctaactgattgagatcgaggggctcactcatgacggaccatacaatgaagaaaaaccccgtaagtataccacacaccgtctggtacgccgacgatatccgccgcggagaacgcgaggcggcagatgtgctggggctcacactctatgagctgatgcttcgcgctggcgaggccgcattccaggtgtgtcgtagcgcgtatcctgacgcccgccactggctggtgctgtgcggtcatggtaataacggcggcgatggctacgtggtcgcgcgactggccaaagcggtcggcattgaggtcacgttgttggcccaggagagcgacaaaccgttgccggaagaggccgcgctggcacgcgaagcatggttaaacgcgggtggcgagatccatgctagcaatattgtctggcccgaaagcgtagatctgattgttgatgcgctgctcggtaccggtttgcggcaagcgccccgcgaatccattagccagttaatcgaccacgctaattcccatcctgcgccgattgtggcggttgatatcccttccggcctgctggctgaaactggcgctacgccaggcgcggtgatcaacgccgatcacaccatcacttttattgcgctgaaaccaggcttgctcactggaaaagcgcgggatgttaccggacaactgcattttgacagtctggggctggatagttggctggcaggtcaggagacgaaaattcagcggtttagtgcagaacaactttctcactggctaaaaccgcgtcgcccgactagccataaaggcgatcacgggcggctggtaattatcggtggcgatcacggcacggcgggggctattcgtatgacgggggaagcggcgctgcgtgctggtgctggtttagtccgagtactgacccgcagtgaaaacattgcgccgctgctgactgcacgaccggaattgatggtgcatgaactgacgatggactctcttaccgaaagcctggaatgggccgatgtggtggtgattggtcccggtctgggccagcaagagtgggggaaaaaagcactgcaaaaagttgagaattttcgcaaaccgatgttgtgggatgccgatgcattgaacctgctggcaatcaatcccgataagcgtcacaatcgcgtgatcacgccgcatcctggcgaggccgcacggttgttaggctgttccgtcgctgaaattgaaagtgaccgcttacattacgccaaacgtctggtacaacgttatggcggcgtagcggtgctgaaaggtgccggaaccgtggtcgccgcccatcctgacgctttaggcattattgatgccggaaatgcaggcatggcgagcggcggcatgggcgatgtgctctctggtattattggcgcattgcttgggcaaaaactgagcccgtatgatgcagcctgtgcaggctgtgtcgcgcacggtgcggcagctgacgtactggcggcgcgttttggaacgcgcgggatgctggcaaccgatctcttttccacgctacagcgtattgttaacccggaagtgactgataaaaaccatgatgaaagcagtaattccgctccctgaataaggaagtgactgataaaaaccatgatgaatcgagtaattccgctccctgatgagcaggcaacattagacctgggcgagcgggtagcgaaagcctgcgatggcgcaaccgtaatctatctgtatggcgatttaggcgcaggtaaaaccacctttagccggggctttttacaggctctgggtcatcagggtaatgtcaaaagccccacttatacgctggtcgaaccctatacgctcgacaacttaatggtctatcactttgatttgtaccgccttgccgatcccgaggagctggagtttatggggatccgcgattattttgccaacgatgccatctgcctggtggagtggccacaacaaggtacaggtgttcttcctgacccggatgtcgaaatacacattgattatcaggcacaaggccgtgaggcgcgcgtgagtgcggtttcctctgcgggtgaattgttgctggcgcgtttagccggttaacctttgaaaggtggcgggatgatgtatcgcatcagaaattggttggtagcgacgctgctgctgctgtgcacgccggtgggtgccgcgacgctctctgatattcaggtttctaacggtaatcaacaggcgcggataacgttgagttttattggcgatcctgattatgcgtttagccatcaaagcaaacgcaccgtggcgctcgatatcaaacaaacgggcgtgattcagggactgccgttgttgttcagcggcaataatctggtgaaggcgattcgctctggaacgcctaaagatgcacaaacgctacggctggtggtcgatcttaccgaaaacggtaaaaccgaagcggtgaagcggcagaatggcagcaattacactgtcgtctttacgattaacgccgatgtgccgccaccgcctcctccgccgcccgtggttgcgaaacgcgttgaaacgcctgcggttgtcgcaccgcgcgtcagcgaaccggcgcgcaatccgtttaaaacggaaagtaaccgcactacgggtgttatcagcagtaatacggtaacgcgtccggcagcgcgcgcgacggctaacactggcgataaaattatcatcgctattgatgccggacacggcggtcaggaccctggcgctatcggccccggtggtacgcgggagaaaaatgtcaccatcgccatcgcgcgtaaattgcgtactttgctcaatgacgatccgatgtttaaaggcgttttaacccgtgacggggattactttatcagcgtgatggggcgcagtgatgtggcacgtaagcaaaacgccaatttcctcgtgagcattcacgctgatgccgcaccgaaccgcagtgcgactggcgcttccgtatgggtgctctctaaccgtcgcgccaacagtgaaatggccagctggctggagcagcacgagaaacagagcgagctgctgggtggggcgggtgatgtgctggcgaacagtcagtctgacccctatttaagccaggcggtgctggatttacagttcggtcattcccagcgggtagggtatgatgtagcgaccagtatgatcagtcagttgcaacgcattggcgaaatacataaacgtcgaccagaacacgccagccttggcgttctgcgcagcccggatatcccaagtgtactggtcgaaaccggttttatcagcaacaacagcgaagaacgtttgctggcgagcgacgattaccaacaacagctggcagaagccatttacaaaggcctgcgcaattacttccttgcgcatccgatgcaatctgcgccgcagggtgcaacggcacaaactgccagtacggtgacgacgccagatcgcacgctgccaaactaaggacgattgatgccaattcaggtcttaccgccacaactggcgaaccagattgccgcaggtgaggtggtcgagcgacctgcgagcgtagtcaaagaactagtggaaaacagcctcgatgcaggtgcgacgcgtatcgatattgatatcgaacgcggtggggcgaaacttatccgcattcgtgataacggctgcggtatcaaaaaagatgagctggcgctggcgctggctcgtcatgccaccagtaaaatcgcctctctggacgatctcgaagccattatcagcctgggctttcgcggtgaggcgctggcgagtatcagtagcgtttcccgcctgacgctcactagtcgcaccgcagaacagcaggaagcctggcaggcctatgccgaagggcgcgatatgaacgtgacggtaaaaccggcggcgcatcctgtggggacgacgctggaggtgctggatctgttctacaacaccccggcgcggcgcaaattcctgcgcaccgagaaaaccgaatttaaccacattgatgagatcatccgccgcattgcgctggcgcgtttcgacgtcacgatcaacctgagccataacggtaaaattgtgcgtcagtaccgcgcagtgccggaaggcgggcaaaaagaacggcgcttaggcgcgatttgcggcaccgcttttcttgaacaagcgctggcgattgaatggcaacacggcgatctcacgctacgcggctgggtggccgatccaaatcacaccacgcccgcactggcagaaattcagtattgctacgtgaacggtcgcatgatgcgcgatcgcctgatcaatcacgcgatccgccaggcctgcgaagacaaactgggggccgatcagcaaccggcatttgtgttgtatctggagatcgacccacatcaggtggacgtcaacgtgcaccccgccaaacacgaagtgcgtttccatcagagccgtctggtgcatgattttatctatcagggcgtgctgagcgtgctacaacagcaactggaaacgccgctaccgctggacgatgaaccccaacctgcaccgcgttccattccggaaaaccgcgtggcggcggggcgcaatcactttgcagaaccggcagctcgtgagccggtagctccgcgctacactcctgcgccagcaagtggcagtcgtccggctgccccctggccgaatgcgcagccaggctaccagaaacagcaaggtgaagtgtatcgccagcttttgcaaacgcccgcgccgatgcaaaaattaaaagcgccggaaccgcaggaacctgcacttgcggcgaacagtcagagttttggtcgggtactgactatcgtccattccgactgtgcgttgctggagcgcgacggcaacattagtcttttatccttgccagtggcagaacgttggctgcgtcaggcacaattgacgccgggtgaagcgcccgtttgcgcccagccgctgctgattccgttgcggctaaaagtttctgccgaagaaaaaagcgcattagaaaaagcgcagtctgccctggcggaattgggtattgatttccagagtgatgcacagcatgtgaccatcagggcagtgcctttacccttacgccaacaaaatttacaaatcttgattcctgaactgataggctacctggcgaagcagtccgtattcgaacctggcaatattgcgcagtggattgcacgaaatctgatgagcgaacatgcgcagtggagtatggcacaggccataaccctgctggcggacgtggaacggttatgtccgcaacttgtgaaaacgccgccgggtggtctgttacaatctgttgatttacatccggcgataaaagccctgaaagatgagtgatatcagtaaggcgagcctgcctaaggcgatttttttgatggggccgacggcctccggtaaaacggcgttagccattgagctgcgtaaaattttaccagtagagttgataagcgttgattctgcccttatttacaaagggatggatatcgggacggcgaagccgaacgctgaagagttactcgccgcgccgcaccgattgctggatattcgcgatccgagccaggcttacagcgctgctgattttcgccgcgatgcgctggcggaaatggccgatatcaccgcggcggggcggatcccactgttagtgggcggtacgatgttgtatttcaaggcattgctggaagggttgagcccgctaccgagcgcagacccggaagtacgggccagaattgagcaacaggcggcagagcaaggttgggagagtttgcatcgtcaacttcaggaggtagatccggttgcggcagcaaggattcatccaaatgatccacaaaggctttcccgggcactggaagtttttttcattagcggtaaaactttaacggaactgacgcaaacgagtggagacgctctaccgtatcaggtgcatcagttcgccatcgccccggcgagccgtgaactgctccatcaacgcattgagcagcgttttcatcagatgttggctagtggttttgaagcagaagtccgggcgctttttgcccgaggagatttgcatacggacttgccttccattcgttgcgtgggttatcgccagatgtggtcttaccttgaaggcgaaatcagttacgatgaaatggtttatcgaggtgtttgcgccacgagacagttggcgaagcggcagataacctggctgcgtggttgggaaggggttcactggcttgacagtgaaaaaccagaacaggcgcgtgacgaagtattacaggttgttggtgctatcgcaggctgaatgtgtacaattgagacgtatcgtgcgcaattttttcagaatcgaaaggttcaaagtacaaataagcatataaggaaaagagagaatggctaaggggcaatctttacaagatccgttcctgaacgcactgcgtcgggaacgtgttccagtttctatttatttggtgaatggtattaagctgcaagggcaaatcgagtcttttgatcagttcgtgatcctgttgaaaaacacggtcagccagatggtttacaagcacgcgatttctactgttgtcccgtctcgcccggtttctcatcacagtaacaacgccggtggcggtaccagcagtaactaccatcatggtagcagcgcgcagaatacttccgcgcaacaggacagcgaagaaaccgaataaggtttcgggctgtttttttacacggggagccagcgatcctgcgttccccgctgatctatttagagggttatacgcttgtttgaccgttatgatgctggtgagcaggcggtactggtacacatctattttacgcaagacaaagatatggaagacctccaggagtttgaatctctggtctcttccgccggtgtcgaagcattgcaggtgattaccggtagccgtaaagcgccgcacccaaagtattttgtaggtgaaggtaaagcagttgaaattgcggaagctgtcaaagcgacgggtgctagcgtcgttctttttgaccatgccctgagcccggcgcaagagcgtaacctggagcgtttgtgcgagtgtcgtgttatcgaccgcaccggccttattttagatattttcgcccaacgtgcgcgtacccatgagggtaagttgcaggttgagctggcgcagctgcgccatctggctacgcgcctggtgcgtggctggacccaccttgaaagacagaaaggcgggataggtttgcgtggtccgggtgaaacccagctcgaaaccgaccgtcgtttgttgcgtaatcgcatcgtgcagatacagagccgcctggaaagagttgaaaagcagcgtgagcaggggcggcaaagccgtatcaaagccgacgttcctactgttagcctggtgggatataccaacgccggtaaatctacccttttcaatcgcatcaccgaagcgcgggtctacgcggcagaccagttgtttgccaccctcgacccgacgttgcggcgtattgacgttgcagatgtcggtgaaaccgtacttgcagataccgtagggtttattcgccacctgccgcacgatctggtggcggcatttaaagccacgttacaagagacgcggcaagccacattactgctgcacgtcattgatgcggcggatgtgcgtgtacaagaaaacatcgaagcggtgaatacggttcttgaagagatcgacgctcacgagatcccaaccctgctggtgatgaacaagatcgatatgctggaagatttcgaaccgcgtattgatcgggacgaagagaacaaaccgaaccgtgtctggctttccgcacagaccggagcggggataccacagctttttcaggctttgacggagcggctttccggcgaggtggcgcagcatacattgcgtctgccaccgcaggaagggcgtctgagaagtcgtttttatcagcttcaggcaatagaaaaagagtggatggaggaggacggcagcgtaagtctgcaagttcgtatgccgatcgttgactggcgtcgcctctgtaaacaagaaccggcgttgatcgattacctgatctaacggcgtagcgtctgaagcgtggagtcatatcctctggcgtcgaaagacaacagggatcaccgcataacaaatatggagcacaaacatggcgtggaatcagcccggtaataacggacaagaccgcgacccgtggggaagcagcaaacctggcggcaactctgagggaaatggaaacaaaggcggtcgcgatcaagggccacctgatttagatgatatcttccgcaaactgagcaaaaagctcggtggtctgggcggcggtaaaggcaccggatctggcggtggcagtagtagccaaggcccgcgcccgcagcttggcggtcgtgtcgttaccatcgcagcggcagcgattgtcattatctgggcggccagtggtttctataccattaaagaagccgaacgcggcgtggtaacacgctttggtaaattcagccatctggttgagccgggtctgaactggaaaccgacgtttatcgacgaagtcaaaccggtgaacgtggaagccgtgcgtgaactggccgcttctggtgtgatgctgacgagcgacgagaacgtagtgcgcgttgagatgaacgtgcagtaccgcgtcaccaatccggaaaaatatctgtatagcgtgaccagcccggatgacagcctgcgtcaggctaccgacagcgccctgcgtggagttatcggtaaatacaccatggaccgcattctgacggaaggtcgtaccgtgattcgtagcgatactcagcgcgaactggaagagacgattcgtccgtatgacatgggtatcacgctgctggacgtcaacttccaggctgctcgtccgccggaagaagtaaaagcggcgtttgacgatgcgattgccgcgcgtgaaaacgaacagcaatacattcgtgaagcagaagcgtataccaacgaagttcagccgcgtgcgaacggtcaggcgcaacgtatcctcgaagaggcgcgtgcgtacaaggcccagaccatcctggaagctcagggtgaagtggcgcgctttgctaaacttctgccggaatataaagccgcgccggaaattactcgcgagcgtctgtatatcgagacgatggaaaaagtgttgggtaacacccgcaaagtgctggttaacgataaaggtggcaacctgatggttctgccgttagaccagatgctgaaaggtggtaacgcccctgcggcgaagagcgataacggtgccagcaatctgctgcgtctgccgccagcctcttcctccacaaccagtggagcaagcaacacgagctccaccagtcagggcgatattatggaccaacgccgcgccaacgcgcagcgtaacgactaccagcgtcagggggaataacgatgcgtaagagtgttatcgcgattatcatcatcgtgctggtagtgctttacatgtctgtctttgtcgtcaaagaaggtgagcgcggtattacgctgcgttttggtaaggtactgcgtgacgatgacaacaaacctctggtttatgagccgggtctgcatttcaagataccgttcattgaaacggtgaaaatgctcgacgcacgtattcagaccatggacaaccaggccgaccgctttgtgaccaaagagaagaaagacctgatcgtcgactcttacatcaaatggcgcatcagcgatttcagccgttactacctggcaacgggtggtggcgacattagccaagcggaagtgctgttgaaacgtaagttctctgaccgtctgcgttctgaaattggtcgcctggacgtgaaagatatcgtcaccgattcccgtggtcgtctgaccctcgaagtacgtgacgcgctgaactccggttctgcgggtacagaagatgaagttactaccccggcggcagataacgccattgccgaagcggcagagcgcgtaacggctgagacgaagggcaaagttccggtcatcaacccgaacagtatggcggcgctgggtattgaagttgtcgatgtgcgtatcaagcagatcaacctgccgaccgaagtgtctgaagcgatctacaaccgtatgcgcgccgagcgtgaagcggtagcgcgtcgtcaccgtagtcaaggtcaggaagaagcggaaaaactgcgcgcgactgccgactatgaagtgaccagaacgctggcagaagctgagcgtcagggccgcatcatgcgtggtgaaggcgatgccgaagcagccaaactgtttgctgatgcattcagtaaagatccggacttctacgcattcatccgtagcctgcgtgcttatgagaacagcttctctggcaatcaggacgtgatggtcatgagcccggatagcgatttcttccgctacatgaagacgccgacttccgcaacgcgttaatataacgactgcggtacaggtcaataaagccaccgcatcctcagggatgtcggtggttttctttttctataaggataatgaatgaatagcacaatctggctggcgcttgccctggttttggtactggaaggtttagggccgatgctttacccgaaggcatggaagaagatgatctctgcgatgaccaatttgcccgataatattttacgtcgttttggcggtggacttgtggttgcgggcgttgtggtctactacatgttgaggaaaacgattggctgaacaaaaaacagactgatcgaggtcatttttgagtgcaaaaagtgctgtaactctgaaaaagcgatggtagaatccatttttaagcaaacggtgattttgaaaaatgggtaacaacgtcgtcgtactgggcacccaatggggtgacgaaggtaaaggtaagatcgtcgatcttctgactgaacgggctaaatatgttgtacgctaccagggcggtcacaacgcaggccatactctcgtaatcaacggtgaaaaaaccgttctccatcttattccaagtggtattctccgcgagaatgtaaccagcatcatcggtaacggtgttgtgctgtctccggccgcgctgatgaaagagatgaaagaactggaagaccgtggcatccccgttcgtgagcgtctgctgctgtctgaagcatgtccgctgatccttgattatcacgttgcgctggataacgcgcgtgagaaagcgcgtggcgcgaaagcgatcggcaccaccggtcgtggtatcgggcctgcttatgaagataaagtagcacgtcgcggtctgcgtgttggcgaccttttcgacaaagaaaccttcgctgaaaaactgaaagaagtgatggaatatcacaacttccagttggttaactactacaaagctgaagcggttgattaccagaaagttctggatgatacgatggctgttgccgacatcctgacttctatggtggttgacgtttctgacctgctcgaccaggcgcgtcagcgtggcgatttcgtcatgtttgaaggtgcgcagggtacgctgctggatatcgaccacggtacttatccgtacgtaacttcttccaacaccactgctggtggcgtggcgaccggttccggcctgggcccgcgttatgttgattacgttctgggtatcctcaaagcttactccactcgtgtaggtgcaggtccgttcccgaccgaactgtttgatgaaactggcgagttcctctgcaagcagggtaacgaattcggcgcaactacggggcgtcgtcgtcgtaccggctggctggacaccgttgccgttcgtcgtgcggtacagctgaactccctgtctggcttctgcctgactaaactggacgttctggatggcctgaaagaggttaaactctgcgtggcttaccgtatgccggatggtcgcgaagtgactaccactccgctggcagctgacgactggaaaggtgtagagccgatttacgaaaccatgccgggctggtctgaatccaccttcggcgtgaaagatcgtagcggcctgccgcaggcggcgctgaactatatcaagcgtattgaagagctgactggtgtgccgatcgatatcatctctaccggtccggatcgtactgaaaccatgattctgcgcgacccgttcgacgcgtaattctggtacgcctggcagatattttgcctgccgggcgaacagtgtgatacattgctgtgtcgggtaagccattacgctatccgacacagtgttaaatcctcgcttttttccttccccgaactgaaataaattagcgacacagcttgtggctggtttatcatcaatataaatgtattttttcccgatttcccttttgaggttgatgtgcagttaacgagtttcactgattacggattacgtgcgctgatctacatggcgagtttgccagaagggcggatgaccagtatttctgaagtgactgacgtctacggcgtctcccgtaatcatatggtcaaaataatcaatcaacttagtcgtgccggctacgtgactgctgttcgtggaaaaaatggcggcattcgcctgggtaaaccggcgagtgcgatacgtattggtgatgtggtgcgcgagctggagcccttaagcctggtgaattgcagcagtgagttttgccacattacacctgcctgtaggttgaaacaggcactttctaaggccgtgcaaagttttcttacggaactggataactacacgcttgccgatttggttgaagagaatcaaccgctttataaattattgctggtggagtgacgaaaatcttcatcagagatgacaacggaggaaccgagatgagtcaagatcctttccaggaacgcgaagctgaaaaatacgcgaatcccatccctagtcgggaatttatcctcgaacatttaaccaaacgtgaaaaaccggccagccgtgatgagctggcggtagaactgcacattgaaggcgaagagcagcttgaaggcctgcgtcgccgcctgcgcgcgatggagcgcgatggtcaactggtcttcactcgtcgtcagtgctatgcgctgccggaacgcctcgacctggtgaaaggtaccgttattggccaccgtgatggctacggctttctgcgggttgaagggcgtaaagatgatttgtatctctccagcgagcagatgaaaacctgcattcatggcgatcaggtgctggctcagccgctgggtgctgaccgtaaaggtcgtcgtgaagcgcgtattgtccgcgtactggtgccaaaaaccagccagattgttggtcgctactttaccgaagcgggcgtcggctttgtggttcctgacgacagccgtctgagcttcgatatcttaatcccgcccgatcagatcatgggcgcgcggatgggctttgtggtcgtagtcgaactgactcagcgtccgactcgccgcaccaaagcggtgggtaaaatcgtcgaagtgctgggcgacaatatgggcaccggcatggcggttgatatcgctctgcgtacccatgaaattccgtacatctggccgcaggctgttgagcaacaggttgccgggctgaaagaagaagtgccggaagaagcaaaagcgggccgtgttgatctgcgcgatttaccgctggtcaccattgatggcgaagacgcccgtgactttgacgatgcagtttactgcgagaaaaaacgcggcggcggctggcgtttatgggtcgcgattgccgacgtcagctactatgtgcgtccgagtacgccgctggacagagaagcgcgtaaccgtggcacgagcgtgtacttccctagccaggttatcccgatgctgccggaagtgctctctaacggcctgtgtagcctcaacccgcaggtagaccgcctgtgtatggtgtgcgagatgacggttagcagcaaaggccgcctgacgggctacaaattctacgaagcggtgatgagctctcacgcgcgtctgacctacaccaaagtctggcatattctgcagggcgatcaggatctgcgcgagcagtacgccccgctggttaagcatctcgaagagttgcataacctctataaagtgctggataaagcccgtgaagaacgcggtgggatcagttttgagagcgaagaagcgaagttcattttcaacgctgaacgccgtattgaacgtatcgaacagacccagcgtaacgacgcgcacaaattaattgaagagtgcatgattctggcgaatatcagcgcggcgcgtttcgttgagaaagcgaaagaaccggcactgttccgtattcacgacaagccgagcaccgaagcgattacctctttccgtagtgtgctggcggagctggggctggaactgccgggcggtaacaagccggaaccgcgtgactacgcggagctgctggagagcgttgccgatcgtcctgatgcagaaatgctgcaaaccatgctgctgcgcagcatgaaacaggcgatttacgatccagaaaaccgtggtcactttggcctggcattgcagtcctatgcgcactttactagcccgattcgtcgttatccagacctgacgctgcaccgcgccattaaatatctgctggcgaaagagcaggggcatcagggcaacaccactgaaaccggcggctaccattatagcatggaagagatgctgcaactgggtcagcactgtagcatggcggaacgtcgtgccgacgaagcaacgcgcgatgtggctgactggctgaagtgtgacttcatgctcgaccaggtaggtaacgtctttaaaggcgtaatttccagcgtcactggctttggcttcttcgtccgtctggacgacttgttcattgatggtctggtccatgtctctagcctggacaatgactactatcgctttgaccaggtagggcaacgcctgatgggggaatccagcggccagacttatcgcctgggcgatcgcgtggaagttcgcgtcgaagcggttaatatggacgagcgcaaaatcgactttagcctgatctccagcgaacgcgcaccgcgcaacgtcggtaaaacggcgcgcgagaaagcgaaaaaaggcgatgcaggtaaaaaaggcggcaagcgtcgtcaggtcggtaaaaaggtaaactttgagccagacagcgccttccgcggtgagaaaaaaacgaagccgaaagcggcgaagaaagacgcgagaaaagcgaaaaagccaagcgcgaaaacgcagaaaatagctgcagcgaccaaagcgaagcgtgcggcgaagaaaaaagtggcagagtgatcaataccctctttaaaagaagagggttagattgctgacaaaatgcgctttgttcatgccggatgcggcgtgaacgccttatccggcctacataatcacgcaaattcaatatattgcagagatcatgtaggccggataaacgtagtgcatcaggcaaaacgtaaacaacgagtacattaatgagcgaaatgatttacggcatccacgcagtgcaggccctgctggagcgcgcccctgaacgttttcaggaagtctttattttaaaaggccgtgaagataaacgtctgttaccgctgattcacgcccttgagtctcagggcgtggttatccagttggcaaaccgccaatatctcgacgagaaaagcgacggtgccgtgcatcagggcattatcgcccgcgtgaagccaggacgtcagtatcaggaaaacgatctgccggatctgatcgctagcctcgatcaaccgttcctgctgatcctcgacggcgtaaccgatccgcacaacctcggcgcgtgcctgcgtagtgcggacgccgcaggcgttcatgcggtgattgtgccgaaagatcgctccgcacagctcaacgctacggcgaaaaaagtagcctgcggcgcggcagaaagcgttccgctgattcgggtgactaaccttgcgcgcaccatgcgtatgttgcaggaagagaatatctggatcgtcggtacggcaggcgaggcggatcatacactctatcagagcaaaatgaccggacgcctggcgctggtgatgggtgcggaaggtgaaggtatgcgtcgcctgactcgtgaacattgcgatgagttgatcagcatcccgatggctggaagcgtttcttccctgaacgttagcgttgcgaccggaatttgcttatttgaagcggtgcgccagcgcagctaatttctcagaattatgaaaagccatccagatttggatggtttttttttgtctatagctggtaagataattacgtattgcaaatattcattttattaatatttaaacttaatctatatggaataatatatgacatggaatccgttggcgctagcgacggcgctgcaaactgtacctgaacaaaatattgatgtaacaaatagcgagaacgcattaattattaaaatgaatgattatggcgatttgcaaatcaatattctttttacttcccgccaaatgattatcgaaacctttatttgtccggtgagtagtatcagcaatccagatgaatttaataccttcttattaagaaatcagaagatgatgccgttgagtagcgtagggatctccagcgtacaacaggaagagtattacattgttttcggggcgttaagccttaaatcttctcttgaagatatcctgcttgagataaccagcctggtagataacgcattggatctggctgaaattacagaagaatatagtcactaattacaaggacgggtatttatgggaattttaaaaagtttatttacgctggggaaaagctttatctcccaggcggaagaatccattgaagaaacccagggcgtgcgcatgctggaacagcatattcgtgacgctaaagctgaactcgataaagccggaaaatctcgcgttgatctgctggcgcgggtgaaattaagtcacgataagctgaaagatttacgtgagcgcaaagccagtctggaagcccgtgcgctggaagcgttaagcaagaacgttaatccgagcttgattaacgaagttgctgaagaaatcgcgcgccttgagaatctcattaccgctgaagagcaagtgttgagcaatctggaagtctcccgtgatggcgtggaaaaagcagttacagcgacagcgcagcgtatcgctcagtttgagcagcaaatggaagtcgttaaagccactgaagccatgcagcgtgcacaacaggctgtaacaacctctaccgttggcgcatcttccagcgttagcacagcggcagaatccttaaaacgcctgcaaacgcgtcaggccgaacgtcaggctcgcctggatgctgccgcacagttggagaaagtcgcagacggtcgcgaccttgacgaaaagctggcggaagccggaattggcggtagcaataaaagtagcgcccaggatgtattagcaagactgcaacgccaacagggcgagtaatttttttgccagcctcgctaaaaggctggcaactattttaaggataaaatatgtctggttttttccagcgtctgtttggcaaggataataagccagctatcgctcgtggtccgctgggacttcatctcaatagtggctttacgctcgacacgttagcgtttcgtttgctggaagatgaattgctgattgcgctgccgggtgaggaatttacggtagccgccgtcagccacatcgatctgggcggcggtagtcagattttccgctactacactagtggcgatgagtttctgcaaatcaataccaccggcggcgaagatattgatgacattgatgatatcaagctctttgtctatgaagagagctacggtatcagtaaagagagtcactggcgcgaggcgatcaacgccaaagcgatgggagcaatgaccttaaactggcaggaaaaacgctggcagcgattttttaacagcgaagaaccgggaaatatcgaacccgtctacatgctggaaaaagtagaaaatcaaaaccatgccaaatgggaggtccataattttaccatgggctaccaacggcaagtaaccgaagatacttacgaatatttgctgctaaatggtgaggaatcttttaacgatctcggcgagccagagtggttatttagccgcgcgttgggtgtcgatatcccgctgacaagtcttcatattattggttaattacaaggacgtttacaatgcatatactggatagtcttcttgcctttagcgcctatttttttattggcgtggctatggtgattatttttctgtttatctattctaaaattacaccgcacaacgaatggcagttaatcaaaaacaataataccgcggcgagtctggcgttcagcggtacattgttgggttacgttatccccttatccagtgcggcaatcaatgcggtgagtattccagactatttcgcctggggcgggattgcactggtgattcagttactcgtttttgctggtgtcagactttatatgcccgcattaagcgaaaaaattattaatcacaataccgcagcaggaatgtttatgggaaccgccgcgctggctggcggtatttttaacgcagcttgtatgacatggtaatggacgatcatggccagaaaacgcaaaagtagaaataacagtaaaattggtcacggagcgattagtcgcattggtagaccgaataatccttttgaaccgtgccgcaatcgctacgcacaaaaatacttaacgttggcgctaatgggcggtgccgcttttttcgtattgaaaggttgtagcgatagtagcgatgtcgataacgacggcgacggaacgttttacgcgacagtgcaggattgtattgatgacggtaataatgccgacatttgcgcgcgtggctggaacaacgccaaaacggcattttatgccgatgttccgaagaatatgactcagcagaactgtcagtctaagtacgaaaattgctactacgacaatgttgaacagagttggatcccggtcgtttctggatttttgttaagccgggttattcgtaaagatcgcgatgagccgtttgtttataacagcggcggttcctcttttgctagccgcccagtctggcgcagcacttctggtgattactcctggcgctccggttctggcaaaaaagagtcttactctagcggcggctttaccaccaaaaaagcgtctaccgtttctcgcggcggctatggtcgttcttccagcgcccgtgggcattggggaggctaatcatgctgagacacaacgttcctgtgcgacgggatctggaccagatcgccgctgacaacggtttcgactttcatatcatcgacaatgaaatctattgggatgagagtcgggcttaccgttttactctgcgccagattgaagagcagatcgaaaaaccgactgcggaactgcatcagatgtgccttgaggtggtggatcgcgcggtaaaagatgaagagatcctgacgcaactggcgatcccgccgttgtactgggatgtgatcgctgaaagctggcgcgcccgcgatcctagcctgtatggacggatggattttgcctggtgtggcaatgcgccggtgaagctgctggagtacaacgccgatacgccaactagtttgtacgagagcgcttattcccagtggctgtggctggaggatgcccggcgcagcggcattattccgcgtgatgccgatcagtacaatgctattcaggaacgcctgattagtcgctttagcgagctttacagtcgggaaccgttttatttttgctgctgtcaggacaccgatgaagacaggagtaccgtgctgtacttgcaggactgcgcccagcaggcagggcaggagagccggtttatctacattgaagatctcggtttgggcgtcggcggcgtactgaccgatcttgatgataatgtcatccagcgtgcatttaagctgtatccgctggagtggatgatgcgtgacgataacggtccgctgctgcgcaagcgtcgcgagcaatgggtggagccgttatggaaaagtatcttgagtaataaagggctaatgccgctgctttggcgcttcttccctggtcatcctaatcttcttgcgtcctggttcgatggcgagaaaccgcagattgccgctggcgaaagctatgtgcgtaaaccaatctatagccgcgaaggcggcaacgtcaccatttttgacggcaagaataacgttgttgaccacgctgatggtgattacgccgatgaaccgatgatctaccaggcgtttcaacctctgccgcggtttggcgatagctacacactcatcggtagctggattgtcgatgatgaagcgtgcggaatggggatccgtgaagataacacactgatcaccaaagacaccagtcgtttcgttccgcattacattgctggataagaatgttttagcaatctctttctgtcatgaatccatggcagtgaccatactaatggtgactgccattgatggagggagacacagtgcactggcaaactcacaccgtttttaatcaacctataccattaaataacagcaacttatacctgtctgatggcgcgctctgcgaagcggtaacgcgtgaaggtgctggctgggatagcgattttctagccagtattggtcagcagttaggaacggctgaatcccttgaactggggcggctggcgaatgtgaatccgcctgaattattgcgctacgatgcgcaaggacgccgtctggacgatgtgcgttttcaccccgcctggcacctgctgatgcaggcgctatgtaccaatcgggtgcacaatcttgcctgggaagaagacgctcgctccggcgcatttgtggcgcgcgcggcgcgttttatgttacatgcgcaggttgaggcagggagcttatgtccgataaccatgacctttgccgccacgccattgttgttacagatgttacccgcgccgtttcaggactggaccacgccgctattgagcgatcgctacgattctcacttattgccaggtgggcaaaaacgcggtttgttgattggcatgggaatgacggaaaagcagggcggttccgatgttatgagcaacaccacccgtgcagagcgtctggaagatggctcttatcggctggtggggcataaatggtttttcagcgttccgcaaagcgatgcgcatctggtgctggcgcagaccgcgggtggtctgtcctgcttttttgtgccgcgctttttgcctgacgggcaacgcaacgcgattcgcctcgagcggctgaaagataagctgggtaatcgctctaacgccagttgcgaagtggagtttcaggatgccattggttggttgttggggctggaaggggaaggaattcgtctgatcctgaaaatgggtgggatgacgcgttttgattgcgccctgggtagccatgccatgatgcgccgtgcatttagcctggcgatttatcatgcacatcaacgccatgtttttggtaatccattgatccaacagccccttatgcgtcatgtcttaagtcgcatggcacttcagcttgaagggcaaacggcgttgctgtttcgtcttgcgcgagcgtgggaccggcgtgccgatgccaaagaagccctgtgggcgcgtttatttacgcctgcggcaaaatttgtgatctgcaaaagaggtatgccgtttgtggccgaagcgatggaggtgctgggcggcattggttattgcgaggagagtgagctgccgcggctttaccgggagatgccggtaaacagtatttgggaaggttccggcaatattatgtgcctggatgtgttgcgcgttctcaataagcaagcgggcgtatacgacttattgagcgaagcatttgtggaagtgaaagggcaggatcgctattttgatcgcgcggttcgtcgtttacagcagcagctgcgtaagccagctgaagaactggggcgagagattactcatcagctattcctgctgggctgcggtgcgcaaatgttgaaatatgcttctccgccaatggcgcaggcgtggtgtcaggtgatgttagatacgcgcggcggcgtacggttgagtgagcagatccagaatgatttattgctgcgggcgacggggggagtgtgtgtgtaagcgtatacgactgatgcgacgctggtttcgattaactaaatgaaatatgtgaaaattgtaggccggacaaggcgctcgcgccgcatccggcattgttcatttgctgtagatgacactcatgcatacagtatcgcctgtacgcgccagttatcaggctgctggtcttcgtacatggtaataatgcggtaccaactcgcaccttgttcatcggcctttaacgccacgatacgttccacgtcctgcggatccccactaatattgctaacactgatctgacctatttcattcaggcccgtcacgcagtcagcactggcgaattctgcagactgtgccgtggcgctcgcaggataagtcactaattgcaggctgggactggcaagtaattgtttcatcgtcagctccatttttcgtttccccacatgttgcagggcattccatcgcggtaataaacgcccaggcttccagccggtaatttattgtgcacaggtaaacgcatagggacgcaaagcaatgtaaagctgactatgtaagttgtctgatttatttacggtacaaaatggcttgactataccactgtcctgtcacgatggtttcgtccaccatgacgacaacgtaataatcagcttttgcagcgacagctttcgctttgatttctgctaatgcgtcatccggagaaccccgaaccatcgtgcttacgctacctattcgctgtaacccttgcgtctggtcgcggcgaatctcttgcggatggtccgttactggcggtgctggctgtggcgtaccttgcagtgcgctacaggcacttaacatcaacaccaataataaactggcaaaccggtaaataacgctattacgtttcctgctaaccatagtgtagtgccttattaatttaactttgggggaatgttcccgaattgttacctggtacgcgattttcgaatgaaaacgtgacgaaagcgtaacccacatctcaacattatgaactaataccgccagcagaaacttgtgctaaggatttcttcatgtcataccagacaaaaaggagagacagatgattgaaatagaaagtcgcgagctggcagatattcccgttcttcatgcttatcctgtcgggcaaaaagataccccgttaccgtgcgtaattttttatcacggctttactagttccagtctggtgtatagctattttgccgttgcgctggcgcaggctggtttgcgggtgatcatgccggatgcgcccgatcacggtagccgttttagtggtgacgcagcgcggcggttaaatcaattctggcaaatcttgctacaaagtatgcaggaattcactactttacgtgcggcaatagccgaagaaaactggctgcttgatgaccgtctggcagtcggtggcgcgagcatgggcgcgatgacggcactggggattaccgctcgccaccccacggtgagatgtaccgccagcatgatgggaagcggctattttacaagtctcgcccgtagtctgtttccaccgctgatacctgaaacggcagcacagcagaatgaattcaataacattgtcgcgccactggcagagtgggaagcgacaaaccacctggaacaacttagtgacagacctctactgctgtggcatggcctcgacgatgacgttgtgcctgccgacgaaagtctacgtttgcagcaggccttaagcgagacgggacgggataaactgctaacctgtagttggcagccaggcgtgcgtcaccgcattacgcctgaggcgttagatgctgccgtgacatttttccgccagcatctttaaacacgcagaatgctgaccccttgcgcttccagttgttgcaggatttccgggttagcatttttgccggtgataagcatatcgatttgatcggcacggctaaaaagcattcccgcgcgttcgccaatcttactgctatcaaccagtaccaccagtttccctaccacgctcagcatcttctgctctgccattgctgtcagcatatcggttttatacaacccttctgcggtcagcccttttccgctggtaaacatccagtgcccggcatagagactgttttcgctgccctgcgggcttaaagtgatggactgacttttgttgtactgtccgcccataatgatcacgctgtcatgttcttgatcgatcaggtaatttgccagcggtagataattagtgatgatttgcactggcttgccacacatttcccgcccaagcagaaacgcggtggagccgcagttgatgactacgctttcgcccggattaaccagctggctggccgctttagcgatacgtactttttcatcgtgattctgcgcctgatgcagattcatcggcgtccagcgcgggcgctgttgggtaatagcttctgcgccattgcgcacttttttcagtttgccgctttcgtcaagtttattgatatcgcgtcgcgcagtggcagggctaattcccagacgctcaacgactttctcaacggtcacaaagcccaattgtgcgagcatttccaggaggatttgatgtctttgtgcttcagtcatgagctattccgataaaatttgatttttttagatgatatttgaaatagccaggaaatactacgccggatagcgcgaacttctccacgctacccggtataaacgacagattacaggaaactcttgaacggcagatccggttcaatagtgaagcaatcatcgaaaccgcgcggatagtggtactcgaagttgtctttatccagcggccaggtaaatttgccacccacctgccagataaacggcttgaagccatacttcaggcgatcttttttcatctcccacagcacgcggatctcttgcggatcggcctggaagttactccagatatcgtggtggaacgggatcactactttcgcattcagcgcttcacccatacgcagcatatcggcgctggtcattttgtcggtgataccgcgcgggttttcgccgtagcttcctaacgccacgtcgatctgatgttcgttaccgtgcttcgcataatagttagagtagtgggagtcgccgctgtgatacagggagccgccaggcgttttgaacaggtagttcaccgcgcgatcgtccatgccatctggcagtacgccagccgctttttgatcggcaggcagggtgatcagtgcagtacggtcgaaagcatcaagcgcatgaatttcaatgtctttcacttttactacatcgcccggtttgaccacgatgcaacgctctttcggtacgccccagccaatccacaaatccacacaggttttcggtccgataaacggtacgtcatctgcacaattctgcatcacggcagcagcgacgttaacgtcgatatgatcgttgtgatcgtgagtcgccagtaccgcgtcgatctggcgaatcgcaaacggatcaagaacaaacggggtggtacgcaggtttggctgcagttttttcacgccagccatgcgctgcatctggtgaccctgtttcattaacgggttaccgtgactttgtttgccagtgccgcaccagaaatcaacgcaaacgttggtgccaccttcgcttttcaaccagatcccggtgcagccaagccaccacatcgcaaatgtgccaggagcgacctgttcttgttcaatttcttcattcaaccagctaccccactccgggaaagtgctcaggatccaggattcacgggtgatacttttcactttactcatcgccatttaccttcatgatagttcaattcgaatcaatatgtgattggttttgattaatcctgacactattttttcaggaaggcaatgaccattttttgactttttgccagggaagttgttgttgattttgagtatggaaagatttaatggaatgtgtaattcaattaactaaatgaatttaaatggataattgtttcgttgtgtgaatcccactctatccatgtggaattatttgcgggtcgcgtcacatttaatcataaataatcttgttgtgattacttttgaaaattagagtgagtgcacaacattccgggtgtgtggaatacccggttacctcttcttcaggagatcgttatggagatcctctacaacatctttaccgtgttttttaaccaggtcatgaccaatgccccgttgttgctgggtattgtgacctgtctgggctacatcctactgcgcaaaagtgtcagcgttattattaaaggcacgattaaaaccataattggtttcatgttgttgcaggcagggtccggcatcctcaccagcaccttcaaaccggtggtggcgaaaatgtccgaagtctacggcattaacggcgcaatttccgatacctacgctagtatgatggcaaccatcgaccgcatgggcgatgcctatagctgggtgggttacgccgtattgttagcgctggcgctgaacatctgttacgtgctgttgcgtcgcattaccggcattcgcacaatcatgttgaccggccacatcatgttccagcaggccgggttgattgccgttacgctgtttatcttcggctactccatgtggaccaccattatctgtaccgcgattctggttagcctctactggggcatcacttccaacatgatgtacaagccgactcaggaagtgacggatggctgtggtttctccatcggtcaccagcagcagtttgcaagttggattgcctataaagtcgcgccgttcctcggcaaaaaagaggagagcgttgaagacctcaaattgccgggctggctgaacattttccacgacaacatcgtctccacggcgattgtgatgaccatcttctttggtgccattctgctctccttcggtatcgacaccgtgcaggcgatggcaggcaaagtgcactggacggtgtacatcctgcaaactggtttctcctttgcggtggcgatcttcatcatcacgcagggtgtgcgcatgtttgtggcggaactctctgaagcatttaacggcatttcccagcgcctgatcccaggtgcggttctggcgattgactgtgcagctatctatagcttcgcgccgaacgccgtggtctggggctttatgtggggcaccatcggtcagctgattgcggttggcatcctggtcgcctgcggctccagcatcctgattattcctggctttatcccgatgttcttctctaacgccaccatcggcgtgttcgctaaccacttcggcggctggcgtgcggcgctgaagatttgtctggtgatggggatgatcgaaatctttggttgcgtctgggcggtgaaactcaccggtatgagtgcctggatgggcatggcggactggagcattctggcaccgccgatgatgcaaggcttcttctccatcggtatcgcctttatggccgtcatcattgtaattgcactggcttatatgttcttcgctggccgcgcgctgcgcgcagaagaagatgcagaaaaacaactggcagaacagtctgcttaataaggagttttgattatgaccgtacgtattctggttgtgtgtggcaacggacaaggcagttccatgatcatgaagatgaaagtggaccagtttttaacccaaagtaacattgaccatacggtaaacagctgcgcggttggcgagtacaaaagcgagttgagtggcgcggatatcatcatcgcttctacgcacattgcgggcgaaatcaccgtgaccggcaacaaatacgtggttggcgtgcgcaacatgctctctcctgccgactttggcccgaaactgctggaagtgatcaaagagcatttcccgcaggatgtgaagtaaggacgcgccatgaaattacgtgatagcctggcggaaaataaatccatccgcctgcaggctgaagcagagacatggcaggaagcggtgaaaatcggcgttgacctgctggtggcggcagatgtggtagagccgcgttactaccaggcgattctggatggcgttgaacagttcggtccttatttcgttatcgctccgggcctggcaatgccgcacgggcgtccggaagagggcgttaagaaaaccggtttctctctggtaacgctgaaaaagccgctggagttcaaccacgatgacaacgatccggtggatatcctcatcaccatggcggcggtcgatgccaatactcaccaggaagtgggcatcatgcagatcgtcaacctgtttgaagatgaagagaattttgaccgtttacgcgcctgccgtaccgagcaggaagtactggatctcattgaccgcaccaacgcggcagcttaagaaggaattgaacatgagtttaccgatgttgcaagtcgcgctggacaaccagactatggatagcgcctacgaaaccactcgcctgattgccgaagaagtcgacattatcgaagtgggcaccattctgtgcgtgggcgaaggcgtgcgtgcggttcgtgacctgaaagcgctctacccgcacaaaatcgtactggcagacgccaaaattgccgatgcaggcaaaatccttagccgtatgtgcttcgaagccaacgctgactgggtgacggtaatttgctgtgcggatatcaacaccgccaaaggcgcgctggacgtggcaaaagagtttaacggcgacgtgcagatcgaactgaccggttactggacctgggaacaggcgcaacagtggcgcgatgcaggcattgggcaggtggtttatcaccgcagccgtgacgcgcaggccgcaggcgtggcgtggggcgaagcggacatcaccgcgatcaaacgtctttccgatatgggcttcaaagtcaccgtcaccggaggcctggcgctggaagatctgccgctgttcaagggtattccgattcacgtctttatcgcgggccgtagtatccgtgatgccgcttctccggtggaagccgcacgtcagttcaaacgttccatcgctgaactgtggggctaaggagcggatatgttgtccaaacaaatcccgcttggcatctatgaaaaagcgctccccgccggggagtgctggctggaacgcctgcaactggcaaaaacgttaggcttcgattttgtcgaaatgagcgtagatgaaactgacgatcgcctgagccgcctcaactggagccgcgagcagcgtctggcgctggtcaatgcgattgttgaaaccggcgtgcgcgtgccgtccatgtgcctttctgctcatcgtcgtttcccgctgggcagtgaagatgacgcggtgcgggcgcaggggctggagattatgcgtaaagctatccagttcgcccaggatgtcggtattcgcgtgatccagctggcgggctatgacgtttactatcaggaagccaataacgaaacgcgtcgtcgtttccgtgacggcctgaaagagagcgttgagatggcaagccgcgcgcaggtgacgctggcgatggagatcatggattatccgttgatgagctccatcagcaaggcgctgggatacgcgcactatctcaacaatccgtggttccagctctacccggatatcggcaacctgagcgcgtgggacaacgatgtgcagatggagttgcaggccggaatcgggcatatcgtcgcggtacatgtgaaagacaccaaacctggcgtcttcaaaaacgtgccgtttggcgaaggtgtagtggatttcgaacgttgtttcgaaacgctcaaacagagtggctattgcgggccgtacctgattgagatgtggagcgaaacggcggaagacccggcggcagaagtggcgaaagcgcgtgattgggtgaaagcgcgcatggcgaaagcgggcatggtggaggcggcataatgcaaaagctaaaacagcaggtatttgaagccaacatggagctgccgcgctacgggctggtgacctttacctggggcaacgtcagcgctatcgaccgcgaacgcgggctggtggtgatcaagcccagcggcgttgcctacgaaaccatgaaagcggccgatatggtggtggttgatatgagcggcaaggtggtggaaggggagtatcgcccatcttccgacactgcgacgcatctcgaactctaccgtcgttacccgagccttggtggcattgtccatacccactccactcatgccaccgcatgggcgcaggcggggctggcgatcccggcgttaggcaccacgcacgccgactacttctttggcgacattccgtgtacgcgcgggttaagcgaagaagaggtgcagggcgagtatgaactgaacaccggcaaagtgattatcgaaacgctgggcaacgccgagccgctgcatacgccgggaattgtggtgtatcagcacgggccgttcgcctgggggaaagatgctcacgatgcggtgcataacgcggtggtgatggaagaagtggcgaaaatggcgtggattgcccgcggcattaacccacaactcaatcacatcgacagcttcctgatgaataaacacttcatgcgtaaacacggtcctaacgcttattacgggcagaagtaaaacacgcgctgcggaaatttccttcctcgggagataactggtctaattccgcagccgtttttcaaaaaaaagccccctgcgaagggggcaaagcaaactatggcaatgtttcgttggttatacctggtgttagcgataaatatccgcgctggcgtgcatattgccgttactccccggttcccgcatcagaattacgtggtagtacgttgcgccttgcgcatctgtttcttcatttaatgcctgacgtgcttcgctttcagtggcgaaattatgattgatataaatcacgcctaagctttgcacatcgtccatatttctggcctggtggttattaatttcaatggctgcccatgtatttgcacttagcaaaagcacagccagaagggctaaaacacgactgaacatagatacctcctcgacggctgactttgtgtgctctcctctgtgatgatcttctgatttaattttaatcaatgataaagaagttgatggtgaccatttctgatgcagttgttcaaaaaaacaccatgatgaagtgtgatgaacttcaaatcagcgtgttagaggttaattgcgaaaggggagatttatttcggctctgcccttgagtttagcgaggcatacaagtactataacgcgtcatttttcagccgacctttaacacgttccttgcctccccgggattcggctgacccagacaggaggctgaataatccgtaaggagcaattcgatgcgtcattacgaaatcgtttttatggtccatcctgaccagagcgaacaggttccgggcatgatcgagcgctacactgctgccatcactggtgcagaaggcaagatccaccgtctggaagactggggccgccgtcagctggcttacccgatcaacaaactgcacaaagcacactacgttctgatgaatgttgaagctccgcaggaagtgatcgatgagctggaaactaccttccgcttcaacgatgccgttatccgcagcatggttatgcgtaccaagcacgctgttaccgaagcatctccgatggttaaagcgaaagacgagcgccgtgagcgtcgcgatgatttcgcaaacgaaaccgctgatgatgctgaagctggggattctgaagagtaatttctgatgaccaaccgtctggtgttgtccggcaccgtgtgcagggctccccttcgaaaggtcagtccaagtggaattcctcactgccagttcgtgcttgagcatcgttctgtgcaggaggaagccggctttcaccggcaggcgtggtgtcaaatgcccgttattgttagcggacacgaaaaccaggccattactcacagtataacggtcggcagtcgcataaccgttcaggggttcattagttgccacaaggcaaagaacggactgagcaaaatggttttgcatgccgagcagattgaattgatagattctggagactaaccatatggcacgttatttccgtcgtcgcaagttctgccgtttcaccgcggaaggcgttcaagagatcgactataaagatatcgctacgctgaaaaactacatcaccgaaagcggtaagattgtcccaagccgtatcaccggtacccgtgcaaaataccagcgtcagctggctcgcgctatcaaacgcgctcgctacctgtccctgctgccgtacactgatcgccatcagtaatcggtcacggtccattaatacgactttgagaggataaggtaatgcaagttattctgcttgataaagtagcaaacctgggtagcctgggtgatcaggtaaacgttaaagcgggctatgctcgtaacttcctggtaccgcagggtaaagctgttccagctaccaagaaaaacattgaattcttcgaagctcgtcgcgctgaactggaagctaaactggctgaagttctggcagctgctaatgctcgcgctgagaaaatcaatgcactggaaactgttaccatcgcgtctaaagctggcgacgaaggtaaactgttcggttccatcggtactcgcgacatcgctgacgctgtaactgcagctggcgttgaagtggctaagagcgaagttcatctgccgaacggcgttctgcgtaccactggcgaacacgaagtgagcttccaggttcacagcgaagtattcgcgaaagtgatcgtaaacgtagtagctgaataattcgttattcaacgagacgtaaaaacgccgaccattggtcggcgttttgctttctatttttcgtcaggtattagtttcgcaagtagatccattcaccattctcttgtgtccataagtcaggatggtttgctggcgttagatacatacgagcgcaactgatgtctcgctcctgcggcactcgctcgaaacccaaaccgctgtagattgcggcactactacttaaggaacgcagaccaattttcaaatcatggggtaaatcagaatacgcgtttagcaatgcagcaatgatgaatccgagggcattagaaacgcctgtaacagtgcgaagttggtcgatataaagatcgattgttggtagttcagaactccagcaattaggcatttgggcaggaagggttacaacgtatcctatcgtttggccggtatagtctggagtaccataaccaggtcccaaaaccacttcgtgtattgtgtatttactgttgggttcgaaggattcgacatcttgcaataaatatttcagttctgcggttaacctcgcacccgcgtaagctttattgtatttctgggcgtgaatattatctaatgtagcttcatggttccatccaaaagaattatcaccattcattgtgattccatcgtaagcattacacctcgtcgctaacttattgaatgcttgccagtcactgagatctagtttgtggatctcaacagtacgtctgccatcgcaattatgatctcttccacgattactaagtaatgtagcgcgtgcgtattgatgaaattttaattttactggtttgtcggtggagctaaaacgagataaatatgcaggaaaactataaatagtcgttggtaatgtcattgtaatgttacctgtttaatgtttttataaatatcgcagctgaatgttcacagaaaaaaatcgatattaataaaaataagtttgttttctgaagtggtgaaaatagcggatggtgaaagatattaatatcaaaaatcgctcattatggatataacgatgcacccggggagaaaatgacttccacgccttacaccgtacattcttgttgtgcggtatgtaattattctacgctgtcggtatcggtgtattcgttaatcagcaggttagccagccacaaaaagccattgagaaaattattgattttacatgggattattatattgctaatccttggtttttaaaaattgtgcatagtgaaaatcaaagtaaaggtgtgcattatgcaaaaagtcagcgtctcttagaaattaaccatgcgcacttgcagttaatggaatccttattggatgaagggaagaaacacaatatttttaagccagatatcgacccattgcaggtgaatattaatattgctgcgcttggcggatattatttgatcaaccagcatacgcttggcctggtttatcacatcagtatggttagtccccaggcactggaagccagacgtaaggtcatcaaagagacaatccttagctggcttttggttgaccctagttctaccgcgcacgaataattaccgcgcacgaataaaactgccatccggctggcgggtgaacaggacctgttgattattccccgtatcaatggttaagcccgtcaccacgccgctggcgttctggcggattttcaccatctgcccgttttgcaaattactcagcggcttacccgcgccttctacctgcgccattgcatagacatcggtagcgggcagtccgtggtcgcggaacagctgcgccatcgttttaccgggttcgacacggtaagagcgccattgattatcaattccgctatctggctggaatggttgcgtttgggtagtttgcggctgctcttctggctggccttcctgtataggttctggagcgaccggagccacctgatcaggaccattttgtggggtaactaattgcgcccgcagctgttcttctgtcggcggttgactttggctctgaatatctaactgcgcttcacgcgtcaccaccggcgcgttgggcgtatcatcagatggaagcagaaatccgaccaccaatacaatggcggcaataatgatcccccgacgatgcatcggcggcagcgggtccatgaagcgaaaattgtccggcgcgtgccagactttctccagggttggttttagttcaaagcgcccgggcatggtttcctcctgctccgcgtcttgttcctcaatcatagcctatgaataagctaacgctatgatgtccgtggtaaacccgcctttattatattcatacgggatattgctattgtttctttttccctgggatttgtcatcattcccgcgacaaagttttacccaaagaagtgtggctgatatgctgcccgctactttataccctaagaaaggaaatacgatgaccaccccaacttttgacaccatcgaagcgcaagcaagctacggcattggtttgcaggtagggcaacaactgagtgaatctggcctggaagggctgctgccagaagcactggttgcaggtattgccgatgcgctggaaggcaaacatccggctgttccggttgatgtggtgcatcgcgcgctgcgtgaaatccacgagcgcgccgatgccgttcgtcgtcagcgtttccaggcgatggctgctgaaggtgtgaaatacctggaagaaaacgccaaaaaaagaaggtgtgaatagcaccgaatctggcctgcaattccgcgtgatcaaccagggtgaaggcgcaattccggcacgtaccgaccgcgttcgtgttcattacaccggtaaactgatcgacggcaccgtgtttgacagctccgttgctcgtggtgaacccgctgaattcccggttaatggcgtgatccctggctggattgaagcactgactctgatgccggtaggttctaaatgggaactgactatcccgcaggaactggcatatggcgagcgcggcgcaggcgcatccatccctccgttcagcaccctggtgtttgaagtcgaactgctggaaatcctctaagcagcgcattctgttcccctcgaacgagaggggagcaggcattcagcaataaacccttcagtttgccaaacggcgctattttgtgttgcaaagaccccgtaagcgtgtatttttgtgagctgtttcgcgttatcaccgtgatatgacactcactttaaacataaaattaacattagatctaaatcttagtattcatcccgcgtattgttacctaatatcgatgagtcccgatacagattcgtcgtatcatagactgactaaaggccgtagagcctgaacaacacagacaggtacaggaagaaaaaaacatggtagatcaggtaaaagtcgttgccgatgatcaggctccggctgaacagagcctacggcgcaatctcacaaaccgacatattcagcttattgccattggcggtgccattggtacggggttgtttatggggtctggcaaaacgattagccttgccgggccgagcatcattttcgtttatatgatcattggttttatgctctttttcgtgatgcgggcaatgggggaattgctgcttagcaatctggaatacaaatcttttagtgacttcgcttccgatttactcgggccgtgggcaggatatttcaccggctggacttactggttctgctgggttgtaaccggtatggcagacgtggtggcgatcacggcttatgctcagttctggttccccgatctctccgactgggtcgccagcctggcggtgatagtgctgctgctgacgctcaatctcgccaccgtgaaaatgttcggtgagatggagttctggtttgcgatgatcaaaatcgtcgccattgtgagcctgattgtcgtcggcctggtcatggtggcgatgcactttcagagtccgactggtgtggaagcgagtttcgcgcatttgtggaatgacggcggctggttcccgaaaggtttaagtggcttctttgccggattccagatagcggttttcgctttcgtggggattgagctggtaggtacaacagctgcggaaaccaaagatccagagaaaagtctgccacgcgcgattaactccattccgatccgtatcattatgttctacgtcttcgcgctgattgtgattatgtccgtgacgccgtggagtagcgtagtcccggagaaaagcccgtttgttgaactgttcgtgttggtagggctgcctgctgccgcaagcgtgatcaactttgtggtgctgacctctgcggcgtcttccgctaacagcggcgtcttctctaccagccgtatgctgtttggtctggcgcaggaaggtgtggcaccgaaagcgttcgctaaactttctaagcgcgcagtacccgcgaaagggctgacgttcagctgtatctgtctgctcggcggcgtggtgatgttgtatgtgaatcctagtgtgattggcgcgttcacgatgattacaaccgtttccgcgattctgtttatgttcgtctggacgattatcctttgcagctaccttgtgtatcgcaaacagcgtcctcatctacatgagaagagcatctacaagatgccgctcggcaagctgatgtgctgggtatgtatggcgttctttgtgttcgtggtcgtgttgctgacactggaagatgacactcgccaggcgctgctggttaccccgctgtggtttatcgcgctggggttgggctggctgtttattggtaagaagcgggctgctgaactgcggaaataaccgcattatcatgctggatggcgcaatgccatccagcttttagatcactcacccgccagcgcgcgtgggaacagtacattgttttccagactgatgtgatccatcaggtcatcaatcagttcattaatgccgttatacatcgctttccaggtggtgcaggcttctggcggcggtgtgacgttattggtggtgtgtttaatcacttccagcagttcgcccgcttcatcgtgctcgctttccattacgctgattggccccattgcctggctgcccatgccttgtttgatcatcgggaagaggatctgctcttctttcatcatgtggctggaaagctcttcatgcagcatggtcaggtattttgtcagcccttttggcacgctcggtttgtcggcgtgaacgcgctcgactttagtcgcttgcagaatcagctccggcagttgctcgcggtgacgatcgtggtagcgcacgatgatatggtcgatgatttctgccagcggggcgctacgccagtctttctcaatcggttgttcagcgagctttgccagttcagcttcaatgacctcaacatccagttctttacgtgccgccgcgcgcgccagcgtctgcttaccgccacagcagtaatccatatcatatttacgaaacagagcactagcgcgaggaatagagagcgccagttcacctaaaggttggtcgcgataagccatagctgatacctcattcttaataagataagatgtattttaaatgcatctttaaggcaaaagctataacccttacgtagcagaggcttatttaactcactgccagcgtgtcaactttcactgacagattcagttaaaggtttttctggttttgctctgaccgcgatgaccacgccaatcactaacagcgcgataccgctcagcgtcattagcggcggcatttgctggcggagtaaaaaggtgtacagcaaacctgccagcgtttcgaaaacaatcagcggcccgagaatcactgtcggtaatagctggctggcgacgttccagcagagtgcgccaacccaactgcaaagcacggctatcgcaaccatcagactaataaacaccagcggacgggggccaaagggtagggagaagtccggcgtttgcgtattcagccagtaacaagcgacgagatagccgataagactaaccggcagtgtgaccagcgcctgcgctgttgcccacatcatcggatgtttgtcgggattttcccgcagccagcgggcgttgcgcagggcataccacgcccagcagaccacggaaactaacgccagcacgatgccagaggtataacgtgcccagtcaaaatcggggagtccgtggtttaactcagcaatattcacacacgccaggccgatgccaatacaaatcagtgctggggcgagttttccccacgcgagtttgccgtcgcgctggctataaagcagattggcaaagacaggaatgaccaccggcagggtgccgataatcatcgtggaaacaggcgcgccagtacgttgaatggcactggcaaggcagaagtaatagatgaggttgcccatcatagtgagcatcaaggcggtaagccagtcgcgacgcgccaactgacgcagacgcacgcgtcccagccaggcaatgggcagcgcaattaaccctaacgccagataacgccccatgctctgcaacatcgccgggtattccggcacgatcaacggcccgacaaaaataagcccccacatcaaccctgctaacagggcgtacagcacgccgctaatcattactggcatccattgatctgtcagaagaaagttcaggaagcagacatgattgctcccggcatcccgtcattatcagagaggatgcgggaggatgccactttaattaattagttattaacattaaaaagatggcttacgctttcggctaacgttgtcgttgggtggccaatcaatttgctaagtgttttgctgtcatcaaacagaccgcctttgcttgcgccaacgtcagaatccgccagcatatccgccagtccgtcgggcagtccgacgcttttcagtgccgcggcgaaatcggcttcgctcagattttgataggtaacctgtttgccgctctgtttggtcagctctgccgctaactgtgtcaacgtccaggcactatcgcccgccagttcgtaaaccttgccttcgtgaccggcttcgctaatcacgcgtgccgcagctgccgcataatctgcccgcgttgcactggcgattttgccatcgcccgccgcaccgataaatacgccgtgttccagtgctgccggggcgctggcgaggtagttttcgctgtaccagccgttgcgcagcagggtgtaaacgatgccagaatcagccagcattttctccgtctcgatgtgctcatcggcgaggccgagcggggaggtatctgcatgtagcaggctggtataagcgataaatttcacgccagccgcctttgcggcattaataacattacgatgctgcggggcacgttgacccacttcgctggaagagatcagcagtagtttttccactccctgaagtgcagatgtcagtgcggcttcatcgccgtagtcagcctgacgcacggtaatgccttgtgctgccagggcttgggcttttgccggattacgaacgatagccactatttggctggcaggaaccgttttcatcaaggattcaataacatagtgaccaagttggccagtggcaccagtaatagcgatcatgggaagtctccatcgttttgtcttgtgtttaaatacgctaacacctaaacttacttttagtaagtacgtacaaaaaggtaagtatgaaatgagtcaggttagcctgagccaacaactgaaagagggtaatctctttgcggaacagtgcccgagccgcgaggtgttgaaacacgtcaccagccgttggggggtgttgattctggtggcgctacgcgaaggtactcatcgctttagcgacctgcggcgcaaaatcggtggggtgagtgaaaagatgcttgcgcagagcttacaggcgttagaacaggatggttttcttaaccgtatcgcgtatccggtggtgccgccgcatgtggaatatagcctcacgccgctgggcgagcaggtgagcgaaaaggttgctgcactggcggactggattgagttgaatttgcccgaggtgttggcggtgcgggatgaacgtgcggcataactgccggatgcgctgagcttatctggtctacggtgcatggcttgtagggcggataagatgcgccagcatcgcatccgccaataaatgccggatgcggttgatgatttataggccgaaaaagaagtgttttacttactcaaatccacctgataaatcgcaaacccgatatcatcggtcgcgactttattcatcggatactgccctttctctttaataaacgctgcggctttatcactcggagaggtttcgaaacggatatccagtttcttatcgccagctatcggtgctaaacgccagttgttatctgccgccgggtgaatttcccccgcacgtttgctctcatcagcaatccacgctgccagcacgctgcggttctcatccggactagcaaaagcgatatggctgtcgcccgtaccggcaaatttgccgccgtaagcgcgatagttattggtggcaaccaggaacatggcgttcggatcaatcggcttgccattaaaggtcaggttcttaatcctttccgcattggcattaatcatctggcactcgccgtcataacgggcgggctgggtaacatcaatctgataattcacaccatcaataacatcaaagttataagtgcggaaaccatcccagttgatgagactctgtggtttcgtgctgttgggatcaatctggttaaactgtcccgcggagcactccagccactctttcacctctttaccgctggctttcaccacaatcagcgtattgggatagagataaagatcggcggcattacggaaggtcaactggcctttttccacctccacatagcttgccgggtcatttttgcgaccaccgactttaaacggtgcggcagcactaagcaccggcagttttgccagatccggatcgccctgaatgtaatgctcgacatacgctttttgcgcgttgttcaccacctgcacggtcggatcgtcctgcaccagcgccagatagctatacatattgtcggcagatttaccgattggcttgctgacgaactggcgtgtggcatcgtgatcggctttgagtgtttctaccagcttgctgtcttccgccgcgagggattttttattagcgatgtcgtaaatcggtcgtgcttccgctttcgcctgcgtcacctgccatttaccgctgtcattactgagttgtaagtcgaccacaccaagatgatcgccccacatgcctggcattaccgccggaacaccattcagcgtgcctttggcgatatcagccccttcgatatcagcaaaatctttacctgggaaaacggcgtgagcatggccaaacataatggcgttaacgcccggaatttcactgaggtaataaacactgttttccgccatcactttatacggatcggcagatagcccggaatgtgccagaacgacaacaacatcggcacctttctcgcgcatttcaggcacgtatttgcgcacggtttcggtaatatcattcaccgtcactttcccggataaattagctttatcccagcccatgatttgtggtggcacgacgccaatatagccaatcttcagcgtctgtttttttccgtctttatcgaccacttcggtgtctttaattaaatacggtgtaaacattggctgtttggttctggcgtcaatgacgttggcatttacataagggaatttcgctcctgccagcgcatttttcaggtaatccagaccgtagttaaactcgtggttgccaagcgttccgacggtatagtccagcgtatttaatgccttatagaccgggtgaatatcacctgcttttaatcctttcgcgctcatgtaatcggccagcggactcccctgaatcaaatcgccgttatcaaccagtacgctgtttttcacttcattgcgggcatcgttaatcaggcttgccgtacgtaccagtccgaatttttccgtggcggtgtctttgtaataatcgaaatccatcatgttgctatgcagatcagtggtttccatgatacgcagatcgaccgtcgctgcattcacactggcggcaatcagcgtggccaggagcgttgcgctaaacttaatcatcagggacatccttttatcatcgggaatacgaaagaaaagggagaataaacgtcttacttatagaacagtgaagaatgccacaattttacgctttgaaaatgatgacactatcacagttggcgcattcattaacgatagggtataagtaaaacaataagttaacaccgctcacagagacgaggtggagaaatgttagatcaagtatgccagcttgcacggaatgcaggcgatgccattatgcaggtctacgacgggacgaaaccgatggacgtcgtcagcaaagcggacaattctccggtaacggcagcggatattgccgctcacaccgttatcatggacggtttacgtacgctgacaccggatgttccggtcctttctgaagaagatcctcccggttgggaagtccgtcagcactggcagcgttactggctggtagactcgctggatggtactaaagagtttattaaacgtaatggcgaattcaccgttaacattgcgctcattgaccatggcaaaccgattttaggcgtggtgtatgcgccggtaatgaacgtaatgtacagcgcggcagaaggcaaagcgtggaaagaagagtgcggtgtgcgcaagcagattcaggtccgcgatgcgcgcccgccgctggtggtgatcagccgttcccatgcggatgcggagctgaaagagtatctgcaacagcttggcgaacatcagaccacgtccatcggctctagcctgaaattctgcctggtggcggaaggacaggcgcagctgtacccgcgcttcggaccaacgaatatttgggacaccgccgctggacatgctgtagctgcagctgccggagcgcacgttcacgactggcagggtaaaccgctggattacactccgcgtgagagcttcctgaatccggggttcagagtgtctatttactaaattcagatggcagaaacagtgtatttcctgattctgccatcctgatttctcccaacctaaaaagttataaataaaaagagattgtatttaaagtgcaaaaattcaattgctaataagttacattttaataatgagcgttttttgatagtttacttctatagtgagatatttaatggcgacataaagtaaccaaataaaataaggttgtcatatgttacccaggatcagacacaataattttattggtgcggtggagttatttgtaaagtctagctatacaaaaacacatagtaacaatttttttaacaacatccatcatgcatttaagaaaaaagattggattagcaattatgatagcctgttaactttgagggagttctttcgttgcgcaactcagattgataaaagtggttatcaggtgcttagtagtaaaaatgaaactgttcacgccatggataagtttcttatcagtttcagccttaaagataacggtgccgaatatacaatgacattgcgaggtagtggatttgaatacgaagaaatacccataacaataaatgaatataacagtttcatggatttcaaaaaccgtgaatttccgttagaacaaaacagacgattgtatgcccgggatattctacagaaaaaacagtctgacataccgaaaaggattaaaggttatattcaccaggcgattggtgacgtgtctttaggttatgccttattggaggatatagtaagcaaattaaaacggggtaaatttgaactccaaataccaggaggtggaattaaagaatgcgatggatggtatatttacgaaaaaataattgatgataattttgccatagtcatagaatctttgggctttgcgcttaaaatctatggaggggatgaacgttttcgtaatggttcctctgttgttttggaggatgaagattactctcttatttataattttctggttaatgcaggttgccaacaagtcgaattagccgaacaagtggatgcgatagtaagtgcgaatctggccgcagatagcgatattaccaaagaaaagatttgcgagaaatataaaagcaccattgaggcgtttaaaaaagagcaactagcgttaccagtattagttcggcgtaagaacagtgagacttaattcccctatcccatagataacgataggggaaaattatttttgcagaatttatgttattgccattatttgagcaacttttgcagcaggtccatcacttgctgcacctcttccggtgtgagcgccccgtctttggcccattgcacgcgaccatccttatccagcaccactacagcggaactttcttcatccagctgccaggcaccgagcgcgacgccattgctatcgacaataaactggctccagggataaagctttttattactctccagactgctgcgcacaaacatcccactacccggaatcgcgtcgtcggtgttaacaatggtggtggtctggtaacgatcgtgcggtaacttcgcacttttaatcgcttcaatcagcgtcgcgtttttctcttttgcagaggtgcgaccagcaatatgttgcagtactcgcacttttcccactaactgcgcgctgttccaggttttgtagctaaactgatctttatcaagcaccaactcgccccgatcggtaatgccaatcggcggcactcgctgaccggtttcgaactgatgtgcggaagccatcatcggcaacagcaggcaggtgagtgccagaatcttgcgtagggtcatggtgtttccttcttatgatatgcaggtgatccgaccacttgggtctgagttttaatcatatgtgctatttatcgaatttcccgcaagtgtgatgccagtttgcggtcaagcgcacaaatcatatgaaaaatgaatgcttatactgaagaccgcgcttcggtaaaaagataattctgaataattgtaacctttaggtaaaaaaagttatacgcggtggaaacattgcccggatagtctatagtcactaagcattaaaatttgcgcctcataatagttgggccgattgtggcaccgcacaggcgtaatactcagcaggagataacaatgaaaattttccaacggtacaacccacttcaggtggcgaagtacgtaaagatcctgttccgtggacggttatacatcaaggacgttggcgcttttgaattcgataagggtaagattcttatcccaaaagtgaaggataagctgcatttgagtgtgatgtccgaagttaaccgtcaggttatgcgtctgcaaacagagatggcttaaccaaagtgctatgcagtaaaaagtgctatgcagtaataagacggctcctgattcaggagccgttgatgtttctgggggttacgcgacgctttcttctttatctttagcgtcaggcagttttgggctaagggcggtggccttgctgtcgatccgggtcaccagcagctggtcgatgcggtagttatcgatatccaccacttcaaatttgtagccggcgaatttcacgctatcggtgcgtttcgggatcttacgcagcataaacatcataaagccgccgatggtttcgtagttgccgctctgcgggaactcgtcaatatccagcacgcgcatgacgtcgtcaattggggtgccgccgtcaatcagccaactgttctcatcacgggcgacaatctgctcttccagcccctgaccgaccagatcgcccatcagcgtggtcatcacgtcattgagggtgatgatccccaccaccagcgcgtactcgttcatgatcaccgcgaagtcttcacctgcggttttaaaactttccaacgcctcactaagggttaacgtatccggcacaatcagcgtgttgcgaatttgtacgccgctgttcagtgccaggctttggttagccagcacgcggttcagcaggtctttagaatcgacataaccgatgatgtggtcaatatcttcattacagacgaggaacttagagtgcggatgttccgccaccttattcttcaggctttgctcatcttcgtggagatcaaaccaaatcacgttttcacgcggtgtcatactagacggaacggtacgggattccagctcaaagacgttttcaatcagctcgtgttcctgtttacgtaacacgcccgccagcgcaccggcttccactaccgcgtagatgtcatcagaagtgatgtcatctttacgtaccattggcagtttgaaaatacggaagattatgttcgccaggccgttgaagaaccacaccagcggggtgcaaacgtacaggcagaagcgcatcgggttgatgatacgcaaagccacagcttctggcgcaatcataccgatgcgtttcggggttaaatccgcaaacaggataaacatgccagtcactaagctgaaagagagaataaagctcagttgctcagagagctctgcgctcatatagcgggagaacaggctgtgaaaagctggagaaaatgccgcatcaccgacgataccgccgagaatcgccactgcgttcagaccgatttggaccacggtaaagaacatgccgggattttcctgcatattcagaacgcgttgggcatttatattgccttcatcagccagcagtttaagtttgattttgcgactggcggcaaggctgatctcggacatgctgaagaacgcacttacagcgatcaagcagagtatgactaaaatactgtttaacatatcttatccgacctttcaggccagatcctcggaaggggaagttgattaatttgtgtgaaatacacattgaaagccgattcgaagaaagtgaaccggcattttcagtggctagtatagcgtaaggtactgtaaagccgccagagggttaaaattcagacagctgaaaaatgcaaaactgcctgatacgctatgccgatcaggcctacgcagtccttgcaatatattgaatttggacgattttgtaggcctggtaagtcgtttacgccgcatcaggcatagacaaagagcactttatcaacaaactacatttgtacccgtaacgttatgcttccggcggcagacagacgccaattccgccaattccacagtaaccatacgggtttttatgcagatattgctggtggtcatcttcggcataataaaacggtgtggcgttagcgatttccgtggtgatgtgacgatcgtcatcggcggcaagcatcgccgcctgaaaacgttccagactggcgcgagctgcggcatcctgttctggggtcagcggataaatcgcactacgatactgcgtgccgtggtcattgccctgacgcattccctgggcgggatcgtgattctcccaaaatacctgtagcaactgctcatagctgatgacggaaggatcgtaaacaatgcgtaccgcttcggcatgacccgtatcaccggagcacacttcccgataagtcggatttggcgtatagccgccggtatagcctgcggcggtgctgtaaacgccgggtaactgccagaacagacgctccacaccccagaaacaacccatcgcaaaaatggcaatctccattccgtcaggtacattggtcatactgtgaccgttgaccgcatgcagcgtggctacgggcatcggggtgttacgtccaggcagggcatcggcgggggaaaccagatgctttttatcaaataaactcatggtgtcgctctcccgaaaatcggtcattggggttaaggttgtaacaagaggcgtatttgcacacaataaccaccgtgaataggtctaaagtaaaacataagaaatatttggggtttagtctgctttttaatccatattactggatttttgttaagccgtttaacggcgttccaggggcaggaaaaaaggatattcaggagaaaatgtgcgctatatccgacagttatgctgtgtaagcttactctgcttaagcggatctgccgtcgccgcgaacgtccgtctacaggtcgaggggttaagcggacagctggaaaagaacgttcgtgcgcagctttctacgattgaaagtgatgaagtgacgccagaccgtcgctttcgcgcacgcgtcgatgatgccatccgcgaaggtctgaaagcgctgggttattaccagccgaccattgaatttgatctccgtccaccgccaaagaaagggcggcaggtattgatcgccaaagtcacgccaggcgtgccggtgttaattggcggcaccgatgtggtattgcgcggcggcgcgcggaccgataaagactatttgaaattgctcgatactcgcccggctattggcacggtactgaaccagggcgattatgaaaatttcaaaaagtccttaaccagcattgcgttgcgtaaaggttatttcgatagcgaatttaccaaagcgcagctgggcattgcgctcggcctgcataaagccttctgggatattgattataacagtggcgaacgttaccgctttgggcatgtgacctttgaaggaagtcaaatccgcgatgaatacctgcaaaatctggtgccgtttaaagagggcgatgagtacgaaagcaaagatctggcagaactgaaccgccgactttctgctaccggctggtttaacagcgtggtggtggctccacaatttgataaagcgcgcgaaacgaaagtattaccattgacgggcgtggttagcccgcgaacagaaaacaccatcgaaaccggggtcggttactctacggacgtgggaccgcgcgtgaaagcgacgtggaaaaagccgtggatgaactcttatggtcacagtctgaccaccagtactagtatttccgcgccggaacagaccctcgacttcagctataaaatgccgctgctgaagaatccactggaacaatattatttggtgcagggcggttttaagcgcactgacctgaacgataccgaatctgactccactacgctggtggcttctcgctactgggatctctccagcggctggcagcgtgccattaacctgcgctggagtctcgaccactttactcagggtgaaattaccaataccacgatgctgttttatcctggggtgatgattagccgcacgcgttctcgtggtggcctgatgccaacctggggcgacagccaacgctactctatcgactactccaacacggcctggggtagtgatgtcgatttctccgttttccaggcgcagaacgtctggatccgcacactgtacgatcgccatcgttttgttacacgcggcacgctgggctggattgaaaccggtgatttcgacaaagtaccgccggatctgcgtttcttcgccgggggcgaccgcagtattcgtggctacaaatacaaatctatcgctccgaaatacgccaacggtgacctgaaaggggccagcaagttgataaccggaagcctggaataccagtacaacgtgaccggaaaatggtggggcgcggtgtttgtcgatagtggcgaagcggtaagcgatattcgccgcagcgactttaaaaccggtaccggggtcggcgtgcgctgggaaagcccggtcgggccaatcaaactcgattttgccgtaccggtcgcggataaagacgaacacgggttacagttttacatcggtctggggccagaattatgagtttatggaaaaaaatcagcctcggcgtggttatcgttatcttactgttgctgggaagcgtggcgtttctggtgggcaccaccagcggcctgcatctggtatttaaagcggcggatcgctgggtgccaggactggatattggcaaggtcaccggcggctggcgcgatctcaccttgtctgacgttcgttatgagcagccaggcgtggcggtaaaagcgggcaatctgcatctggctgtcgggcttgagtgcctgtggaacagcagtgtttgtattaatgatctggcgctgaaagacattcaggtcaacatcgacagtaaaaaaatgcctccttctgaacaggttgaagaagaggaagatagcggtccgctggatctctccacgccgtatcccatcaccctgacacgggtggcactggacaacgtcaacattaagattgatgacaccacggtaagcgtgatggacttcacctccggcctgaactggcaggagaaaaccctgaccctgaaaccgacgagcctgaaaggcctgctgattgctctgccgaaagtggcggaagtggcgcaggaagaagtggtcgaaccgaaaattgaaaatccgcagccggatgaaaagccgctcggcgaaacgctgaaagatctcttttctcgcccggtattgccggaaatgaccgacgtgcatttgccgcttaacctgaacattgaagagtttaagggcgagcagctgcgcgtgacgggcgacacggacatcaccgtgagcaccatgctgctgaaagtgagcagcattgacggcaatactaaactggacgccctggatatcgattccagtcaagggatcgtcaacgccagcggcacggcgcagctgagtgacaactggccggtggacatcactctcaacagtacactgaacgtggagccgttgaaaggtgaaaaagtgaagctgaaaatgggcggcgcgctgcgcgaacagctggagattggcgttaatctttccggtccggtggatatggatttacgcgcccagacgcgactggcggaagccggattgccgctcaacgtggaagtgaacagcaaacagctttactggccgttcactggtgagaagcagtatcaggcggatgatctgaaactgaaacttaccggcaaaatgaccgattacacgctctctatgcgtacggcagtgaagggacaggagatcccgcccgcgactattaccctcgacgccaaaggtaatgaacagcaggtcaatctcgacaaactcaccgtcgcggcgctggaagggaaaactgaactcaaggcgttgctcgactggcaacaggccattagttggcgcggtgagctaacgcttaacggcattaacaccgccaaagagttcccggactggccgagcaaactcaatggcttgattaaaacccgcggtagcctgtacggcggcacctggcagatggacgtgccggagttgaagctgaccggtaacgttaaacagaacaaagtgaacgttgacggcacgctgaaaggcaacagttatatgcagtggatgatcccagggcttcatctggaactcgggccaaacagtgccgaagtgaaaggcgagctgggggtaaaagatctcaatcttgatgccaccatcaacgcgccggggctggataacgcgctgccggggcttggcggtacagcgaaagggctggtgaaagtacgcggcacggtggaagcgccacaactactggcagatatcaccgcgcgcggcctgcgctggcaggaactttccgtggcgcaggttcgcgtggaaggcgatatcaaatccaccgatcagatcgccgggaaactcgacgtacgcgttgagcaaattagccagccggatgtaaatatcaacctcgtcaccctgaatgccaaaggcagcgaaaagcagcacgagctacagttgcggattcagggggagcctgtctccgggcagcttaatctggcaggaagttttgatcgcaaagaagaacgctggaagggaactcttagcaatacccgcttccagacgccggttggcccgtggagcctgacccgcgatattgcgctggattaccgcaataaggagcaaaaaatcagcatcgggccacactgctggcttaacccgaatgcggaactgtgcgtgccgcaaactatcgatgcgggggccgaagggcgtgcggtggtgaatctcaaccgcttcgacctcgccatgctgaaaccgtttatgccagaaaccactcaggccagcggtatcttcacgggtaaagcggacgttgcctgggacaccacgaaagaggggctgccgcagggcagtatcacccttagcgggcgtaacgtgcaggtaacgcaaaccgtcaacgatgcggcgctgcccgtggcgtttcagacactgaatctgacggcggaattgcgtaacaaccgtgccgaattgggctggaccatccgcctgaccaataacggccagtttgatggacaggtgcaggtgaccgatccgcaaggccgccgtaatcttggtggcaacgtcaatatccgtaacttcaaccttgcgatgataaaccccatctttacccgtggggaaaaagcagcggggatggtgagtgccaacttgcgtctgggtggtgatgtgcaaagcccgcagttgtttggtcagcttcaggttacgggtgtggatatcgatggcaactttatgccgtttgatatgcaaccgagccagcttgcggtcaactttaacggtatgcgcagcacgcttgccggtacagtacggacccagcagggtgaaatctacctgaacggtgatgccgactggagccaaattgaaaactggcgggcgcgggtaacggcgaaaggcagtaaagtgcggatcaccgtgccgccgatggtacgaatggatgtaagcccagatgttgtattcgaggctacaccaaacctgtttaccctcgatggtcgcgtggatgtcccttgggcgcgcatcgtggtgcacgatctgccggaaagcgcagtaggcgtctccagcgatgtggtgatgcttaacgataacctgcaaccggaagagccgaaaacggcgagcattccgattaacagtaacctgattgtccacgttggcaacaatgtgcgcattgacgcctttggcctgaaagcgcggctgacgggcgatctcaatgtcgttcaggacaaacaagggctgggtctgaacgggcagatcaacatccctgaagggcgcttccatgcctatggtcaggatctgattgtgcgtaaaggtgagttactgttctctggtccgccagatcaaccgtatcttaatattgaagctattcgtaacccggatgctacagaagacgacgtaatcgccggagttcgcgtcactggtctggcggacgaaccgaaagcggagatcttctctgacccggcgatgagccaacaagctgccttgtcttatttgctacgtggacaagggctggagagcgatcagagcgacagtgcggcaatgaccagcatgctgattggtttgggggttgcgcaaagtggccagattgtgggtaaaatcggcgagacgtttggcgtaagcaatttagcgctcgacacccagggagtaggcgactcctcccaggtagtggtcagcggctatgtattgccaggtctgcaagtgaaatacggcgtgggtatatttgactctatagcaacactcacgttacgttatcgcctgatgcctaagctatatctggaagccgtgtctggtgtagaccaggcactggatttgctctatcagttcgagttttaacaatgcgaatatttgtctacggcagtttacgccacaaacaaggcaacagtcactggatgaccaatgcccagttactgggcgatttcagtatcgataactaccagttgtatagcctgggccactatccaggcgcagttccggggaacggaacggtacacggtgaagtttatcgtattgacaacgccacgctggccgaacttgatgccttgcgcaccaggggcggtgaatacgcgcgccagttgattcagacgccgtacgggagtgcatggatgtacgtttatcaacgacccgtcgatggattaaagctaattgaaagcggcgactggttagacagggataagtaaccatatgcatacgccaccttcgggtggcgttgttttttgcgagacgactcgcattctgttttgtaattccctcaccttttgcttttctctccgagccgctttccatatctattaacgcataaaaaactctgctggcattcacaaatgcgcaggggtaaaacgtttcctgtagcaccgtgagttatactttgtataacttaaggaggtgcagatgcgtattaccataaaaagatgggggaacagtgcaggtatggtcattcccaatatcgtaatgaaagaacttaacttacagccggggcagagcgtggaggcgcaagtgagcaacaatcaactgattctgacacccatctccaggcgctacagccttgatgaactgctggcacagtgtgacatgaacgccgcggaacttagcgagcaggatgtctggggtaaatccacccctgcgggtgacgaaatatggtaaagaaaagtgaatttgaacggggagacattgtgctggttggctttgatccagcaagcggccatgaacagcaaggtgctggtcgacctgcgcttgtgctctccgttcaagcctttaatcaactgggaatgacgctggtggcccccattacgcagggcggaaattttgcccgttatgccggatttagcgttcctttacattgcgaagaaggcgatgtgcacggcgtggtgctggtgaatcaggtgcggatgatggatctacacgcccggctggcaaagcgtattggtctggctgcggatgaggtggtggaagaggcgttattacgcttgcaggcggtggtggaataaggtgtgtttatttatcgcgggcataaaaaaacccttactaaccgaagcccggcgttcagggttattacgccagaagaacttatttattctttgcgcgctcgaaggaggcaacgatttcagctttagcggcttctgcgttttcccaaccttcaactttcacccacttgcctttttcgaggtctttgtagtgctcgaagaagtgagcgatttgcgctttcagcagttcaggcagatcgttaacgtctttaatgtgatcgtattctttgctcagcttgctgtgcggaaccgcaaccagtttcgcatcttcaccggcttcgtcggtcattttcagaacgccaaccggacggcaacggatcacagaacccggctgcagcgggtacggagttgggaccagtacgtcaaccgggtcaccgtccagagacagggtgtggttgatgtaaccgtagttgcatggatagaacatcgcggtggacatgaagcggtcaacgaacagtgcgccgctctctttgtcgatttcgtatttgatcggatctgcgttagccgggatctcaataacaacgtagatgtcttccggcagatctttacccgcagggacgttgagtaagctcatgtctgtttcctttaaaaatatgtggcaaacaagtgccgagtattatagccaactcgcgccgaatgtcttcgcttgttttcgtcttcattttcctttttcaccagttttaagacggtatacagagcaggaaaatccataaccgtagccgcatttttcatagtgagatgaaagcgattacaaacttgtgattaacgttttatttacttttttgaagtgtgatgtaacgcaatctgttacataacgaattgtctatagttttttcgcgaacatcttttaaccaataataactaccccgacgaggacaaccctatgtggaaacgcttacttatagtctctgcagtcagcgcagccatgagctctatggcgttggccgctccattaaccgttggatttagccaggtcggaagcgaaagtggctggcgtgccgcagaaaccaatgtggcgaaaagtgaagccgaaaagcgcggaatcacgttgaaaattgccgatggtcagcaaaagcaggaaaaccagattaaagcggtacgttccttcgttgcacaaggggtggatgcgatctttatcgctccggtggtcgcgacaggttgggaaccggtattaaaagaggcgaaagatgccgaaatcccggtattcttgctcgatcgttccattgatgtgaaagacaaatctctctatatgaccaccgtcactgccgacaacatcctcgaaggcaagttgattggtgactggctggtaaaagaagtgaatggcaaaccatgcaacgtggtggagctgcagggcaccgttggggccagcgtcgccattgaccgtaagaaaggctttgccgaagccattaagaatgcgccaaatatcaaaatcatccgcagccagagtggtgacttcacccgcagtaaaggcaaagaagtcatggagagctttatcaaagcggaaaacaacggcaaaaacatctgcatggtttacgcccataacgacgacatggtgattggtgcaattcaggcaattaaagaagcgggcctgaaaccgggcaaagatatcctcacgggttccattgacggtgtaccggacatctacaaagcgatgatggatggcgaagcgaacgccagtgttgaactgacgccgaatatggcaggtcccgccttcgacgcgctggagaaatacaaaaaagacggcaccatgcctgaaaagctgacgttaaccaaatccaccctttacctgcctgataccgcaaaagaagaattagagaagaagaaaaatatggggtattgagggttgctatgcctgatgccgattcgtaggccggataaggcgctcgcgccgcatccggcgatggtgcactgaagcctgatgcgacgcttaccgcgtcttatcatgcctactgggagcacgctttacaccgggggaaaccatgacgaccgaccaacaccaggagatcctccgcaccgaaggattaagtaaatttttccccggcgtcaaagcgttagacaacgttgatttcagcctgcgccgtggcgaaatcatggcgctgctcggtgaaaacggggcgggaaaaagtacgctaatcaaagcattaactggtgtataccacgccgatcgcggcaccatctggctggaaggccaggctatcagtccgaaaaataccgcccacgcgcaacaactcggcattggcaccgtctatcaggaagtcaacctgctacccaatatgagcgtcgctgataatctatttataggccgcgaacccaaacgcttcggccttctacgccgcaaagagatggaaaagcgcgccaccgaactgatggcatcttacggtttctccctcgacgtgcgcgaaccgctcaaccgctttagtgtcgcgatgcagcaaatcgtcgctatttgtcgggctatcgatctctctgccaaagtgctgatcctcgatgaacccaccgccagtctcgacacccaggaagtggagttactgtttgacctgatgcgtcagttgcgcgatcgcggcgtcagcctgatttttgtcactcactttctcgatcaggtctatcaggtcagcgatcggatcaccgtcttacgcaacggcagtttcgtaggctgtcgggaaacgtgcgagctaccgcagatcgaactggtaaaaatgatgctggggcgcgagctggatacccacgcgctacagcgtgccgggcgaacattgttgagcgacaaacccgttgccgcgttcaaaaattacggcaaaaaaggaacgatcgcaccgtttgatctcgaagtacgccccggcgagatcgtcggtctggctggattgctgggaagtggacgtaccgaaaccgccgaagtgatcttcggtatcaaacctgctgacagcggcacggcgttgatcaaaggcaaaccgcaaaacctgcgaagcccacatcaggctagcgtactgggcattggcttctgcccggaagacaggaaaaccgatggcatcatcgctgccgccagcgtgcgggaaaatatcatcctcgctctccaggcccagcgcggctggctacgtcccatttcccgcaaagaacagcaagagattgccgaacgctttatccgccagcttggcattcgcacacctagtactgaacaaccgattgaatttctctccggcggcaatcagcaaaaagtgttgcttagtcgttggctactgacccgaccgcaatttctgatcctcgatgagccaacccgcggcattgatgttggtgcccacgccgagatcatccgcctgattgaaacgctatgcgccgatggtctggcgctgctggtgatctcctccgaactggaagagctggtgggctatgccgatcgggtgattatcatgcgcgatcgcaaacaggtggcggagatcccgctggcagagctttccgttccggcgatcatgaacgccattgcggcgtaaggagaacagtgtgatgcctcaatctcttccggacaccactacgccaaaaaggcgctttcgctggccgacggggatgccgcagctggtagcactgttgctggtgctgctggtcgatagcctggtagccccgcatttctggcaggtggtgcttcaggatgggcgtttgttcggtagccccatagacattcttaaccgtgcagctcccgttgcgttactggcgattggcatgacgctggtgatcgccaccggtgggattgatctctccgtaggggcggtgatggctatcgccggagccacaacggctgcgatgacggtcgcgggattcagcctgccgattgttttgttaagcgccctgggcaccggcatcctggcgggattgtggaacggcatactggtagcgatcctcaaaattcagccgtttgtcgccactctgatcctgatggtcgccgggcgcggcgtggcgcaactgatcaccgccgggcagatcgtcacgtttaacagcccggatctcagttggttcggcagtggaagcctgttgttcctgccaacgccggtcattatcgcggtgctgacgcttatcctgttctggctgttgacccgcaaaacggcgctggggatgtttatcgaagccgttggtatcaacattcgggcggcaaaaaatgccggggtaaacacgcgaatcatcgtcatgctcacttatgtgttgagcgggctgtgtgcggcgattgcgggcattatcgtggcggcggatattcgcggtgccgatgccaacaacgctgggttatggctggagctggacgccattctcgcggtggtgattggcggcggaagcctgatgggcgggcgctttaacctgctacttagcgtggtgggggcgctgattattcaggggatgaacaccggaattttgcttagcggctttccgccagagatgaaccaggtggtgaaagcggtggtggtgctttgcgtgctgattgttcagagccaacgctttatcagtctgattaaaggagtacgtagccgtgataaaacgtaatttgccactgatgatcaccatcggcgtctttgtgttgggttatctttactgcctgacccagtttcccggttttgcttccacaagagtgatctgcaatatcctgaccgataatgcctttcttgggatcattgccgttggcatgacctttgtgatcctcagtggtgggatcgatctctccgtcggtagcgtgatcgcctttactggcgtgtttctggcaaaagtgattggcgatttcggcctcagcccgctgctggcgtttccgctagtgctggtgatgggctgtgccttcggcgcatttatggggcttctgatcgacgccctgaagatcccggcatttatcattacgcttgcggggatgttctttttgcgcggcgtcagctatctcgttagcgaagagagcattccgataaaccatcccatttatgacacgctcagtagccttgcgtggaaaatccctggcggcggtcgcttaagtgcgatgggactgctgatgttggcggtggtggttatcggcatattcctcgcgcatcgtacccgttttggtaatcaggtatacgccattggcggcaacgcaacgagcgcgaatctgatggggatttccactcgcagcaccactattcgcatttatatgctctccaccggactggcaacgctggcggggattgtcttcagcatttatacccaggccggatatgcgctggcgggcgtaggtgtggaactggatgctatcgccagtgtggtaattggcggtacgcttttgagcggtggcgttggaacggtattagggacgctttttggcgtggcgattcagggactgattcagacttacataaactttgatggcacgctgagttcctggtggacgaaaatcgccatcggtattttgttgtttatttttatagcattacagcgtggattaacggtgctgtgggagaatcgtcagagtagcccagtgacaagagtcaacattgcgcagcaataaaaacgcctctccgtgtggagaggcgcaggagattacgcgtccgggaactcacggataaagcgttcgacatcttcaaccatatggtcgttgccgacaaagaaactacggcgctggtgcagggtttccgggatgatatccagaatacgctctttgccatcgctcgctttaccgcccgcttgttccgccaggaatgccatcgggttgcactcatacagcaaacgcagtttgccgtccgggtggctggcggtgcttgggtagagataaataccgcctttcagcaggttacggtggaaatccgcgaccagactaccgatataacgactggtataagggcggttggtggatttatcttcttcctggcagaatttaatgtacttcttcaccccgttcggaaacttaatgtagtttccttcgttgatggagtaggttttgcctttctccgggaagcgcatccgttcctggcacaggcagaaaacgccgaggctaggatcgtaagtaaaggcgtgaacaccgcatccggtggtgtaaaccagcatggtagaggagccgtataccacgtaacctgccgcaacctgtttgttaccaggctggaggaaatcttcttccgttaccggcgtgccaacaggcgtaacgcggcggtagatggagaaaatggtaccgacagagacgttaacatcgatgttggagctgccatccagggggtccatcagcaccacgtattttgcgtgttcacagccttcaaagacgacaatctcatcttcttcttcagaggcaatgcccgcaacgatatcgcgtgctttcagtgcggctttcagtttttcattagcgaacaagtcgagtttctgctgaacctcgccctgcacgttctcagcaccgctggcacccaggatatcaaccagtcctgctttgttgatatcgcgatggataatcttggcgcccagttttattgcgctcagcaaagcagtgagctcaccggtagcatgagaaaactcgtgctgcttttcgacaataaattcacctaacgttttcataaaactttccctgcaatgtttatggagtaaagcgaccgcaacaatcttaacaaataatctcaatgttgcgctcaggtgaatcgcgccagcaaattacggattatcctgaaatgcgtttctcacttgcccgacatatgcgtaaaatgagcggcagattaaaaaaggatagtgacgtatgcgcattcatattttaggaatttgtggcacatttatgggcggtctggcgatgctggcgcgccagttaggccatgaagtaacgggtagcgacgccaatgtgtatccgccgatgagcaccttacttgagaagcaaggcattgagctgattcaggggtacgatgccagccagctcgagccgcagccggatctggtgattattggcaacgccatgacccgtggaaatccgtgtgtggaagcggtactggaaaaaaatatcccttatatgagtggtccacagtggctgcacgattttgtgctgcgcgaccgctgggtgctggccgttgccggtacacacggcaaaaccaccaccgcgggaatggcgacctggattctggaacagtgtggttacaaaccgggctttgtaatcggcggtgtgccggggaactttgaggttagcgctcatctgggcgaaagcgacttctttgttatcgaagcggatgagtatgactgcgccttcttcgacaaacgctctaaatttgttcattactgcccgcgtacgctgatcctcaacaaccttgagttcgatcacgccgatatctttgacgacctgaaagcgatccagaaacagttccaccatctggtgcgtatcgttccggggcagggccgtattatctggccggaaaatgacatcaacctgaaacagaccatggcgatgggctgctggagcgagcaggagctggtgggtgagcagggtcactggcaggcgaaaaagctgaccaccgatgcttccgaatgggaagttttgctggatggcgaaaaagtgggcgaagtgaaatggagcctggtaggcgaacataatatgcacaatggcctgatggcgattgcagcggctcgccatgttggtgtagcgccggcagatgccgctaacgcgctgggtagctttattaatgctcgtcgccgtctggagttgcgtggtgaagcgaatggcgtcacggtatatgacgattttgcccatcacccgacggcgattctggcaacgctggcggcgctgcgtggcaaagttggtggtacggcgcgcattattgctgtgctggagccgcgcagcaataccatgaaaatggggatctgcaaagacgatctggcacctagtttaggtcgtgccgatgaagtcttcctgctgcaaccggcgcatattccgtggcaggtggcagaagtggcagaagcctgcgttcagcctgcacactggagtggcgatgtggatacgctggcagatatggtggtgaaaaccgctcagcctggcgaccatattctggtgatgagcaacggcggttttggtgggatccatcagaaactgctggatgggctggcgaagaaggcggaagccgcgcagtaattcggccttagccagatatagtatgcgtaggccggataaggcgttcacgccgcatccggcatttgagcatagtgcctgatgcgacgcttgatgcgtcttatcaggcctacaggtgcaccgtatccggcaaaccatactcacatcaacaacgaaaattacccttcgttctccgctaactcgcgcagatactggaaaatctggcgtgcggatttcggcggcttattcccttctttctctttcttcgcgttgcggatcagagtacgcagttgctgacgatcggcatcgggccacagatttaatacctcagcgatggcgtcatcaccttgatcgatcagacgatcgcgcaggttttccagtttatggaacagcaccacctgctggttgtgacggtttttcagcttatccagcgcctgacgaataggctctacgtcgcgctggcgcagcatcttaccgatgagctgcaactggcggcggcgaccttccatcttaatacgctgggcgagctcaatagccgcgcgcagatccgcatctaacgggatcttatccagcgcgtttttccccagatcaacaatttccgcgccaaggcgttttagctcctcggcatcacgtttaatttcacttttactgacccagataatttcatcgtcttcgtcttcgatgtcatcaccgggaacgtcgtcgagccagtcttcgggctgcttagtcatctcaggctccttaaaaaaagaggctaatgttaccagttaagatgcgcactgaaaaacggttctctgttagacttcagagaaactctctacattatggcacttgcaatgaaagtaatctctcaagttgaagcgcagcgcaagattctggaagaagcagtttccactgcgctggagttggccagtggcaaaagcgacggtgcggaagttgccgtcagcaagaccaccggcattagcgtaagcacgcgttatggtgaagtggagaatgttgaattcaatagcgatggcgcgctggggatcactgtttatcaccagaaccgcaaaggtagcgcaagttccaccgatttaagcccgcaggccattgcccgtactgtacaggcggcgctggatattgcccgttataccagcccagatccctgtgccggcgtggcagacaaagagctgctggcctttgacgcaccagatctcgacttgttccaccctgcggaagtttccccggatgaagccattgaactggcggcccgcgcagaacaggcggcattgcaggcggacaaacgcatcaccaataccgaaggtggcagctttaacagccactacggtgtcaaagtttttggcaacagccacggcatgttgcagggttactgcagtacgcgtcatagcctctccagctgtgtaattgccgaagaaaatggcgatatggagcgtgattacgcctacaccattggtcgtgcgatgagcgatctgcaaacgccagagtgggttggggccgactgtgctcgccgtactttaagccgtctgagtccgcgtaaactctccaccatgaaagcgccagtcatttttgccaatgaagtggcaaccgggctttttgggcatctggtgggggcgatagcgggtggaagcgtttatcgtaaatctaccttcctgctggatagcctgggtaaacaaattctgccggactggctgaccattgaagagcatccgcatctgctgaaagggctggcgagcacgccattcgacagcgaaggtgtgcgcaccgagcgtcgcgatattattaaagatggcatcctgactcagtggctgctgaccagctacagcgcgcggaaactggggctgaaaagcaccggacatgcgggcggtattcacaactggcggattgccggacaaggtctaagcttcgagcagatgctcaaagagatgggcaccgggctggtggtgacggaattgatgggccagggcgtgagtgccattaccggtgattattcccgtggtgcagcgggcttctgggtagagaatggcgaaattcagtatccggtgagcgaaatcaccatcgcaggtaatttaaaagatatgtggcgcaatattgtcaccgtcggtaacgatattgaaacacgcagtaatatacagtgtggttctgtgctgttgccggagatgaaaatcgccggacagtaaaaaaactggcgcgacctgccgcgctataaactaaaaaattacacaaaatcattcgcactgcatcgagacggaaagtgaatgagggccggggagcgtactcgcagtacgtgacccggtcgaatgagcgtagtcgtcgatgaggcagtgtgaaggatgaagtgtaaataaaaaaggaactattcttgcagtctcctcgttggtattcagttcggcgtcatttgctgctgatctcgaagacaatatggaaaccctcaacgacaatttaaaagtggtcgaaaaagccgataacgcggcgcaagtcaaagacgcgttaacgaagatgcgcgccgcagcgctggatgcgcaaaaagcaacgccgccgaagctcgaagataaaagtccggacagcccggaaatgaaagatttccgccacggtttcgacattctggtcggtcagattgacgacgcgctgaagctggcaaatgaaggtaaagtaaaagaagcgcaggctgctgcagagcaactgaaaacgacccgcaatagttatcacaagaagtatcgttaattcctcatttccctgttgcctgcactcaggtaacagggaacttatcatcgcaaatgatgcaccacctgattgctgctgccgcgccagatcagggaagggtcttttaaatcctgcacaaatttgccgtcgaccagcacgttaatcaaatcaacaacctgcatttgcgcagcgttgagttcgtcgagtttatagcctgtccacacccagatgtctttacccggacactcggcgcggatgcgttgtaccagtttcagaatatccggcacgttttgcggatgcagcggatcgccgccggagagggaaataccctggcgtttgatacgagtgtcattcagatcgttaatgatctggtcttccattgctttggtaaatggctgaccggaatttacccgccatgtgcttttgttatagcaaccggggcattcatgaacacacccggagacaaacagggtgcaacgagtgccggggccgttgacgatgtcgacaggatagtactgatgataattcattatttcgcctggcttatcagtccgcgtgtaggctgcatccggtaatcaatgcctgatgcgacgctgtcgcgtcttatcagacctggagcaattgccaaatgtaggccggataaggcgtttacgccgcatccggcatttgcttagctcagagtgaagattaacctatctgcccattccccaaatgtttaacgcggcgcttaacttcttcctgcttaccagcgttaaacggacgtgcatccgggctacctaaatatccgcacacgcggcgagttacgctcacacgggaggcgtcatggttaccacatttcgggcaagtgaagcctttgctggtgcactcgaactcaccggtaaagccacactcgtagcactcatcaatcggtgtattggtgccgtaatacggtacatgctgatagctgtaatcccagacatcttccagcgccttcaggttgtgctgaatgtttggatactcgccgtagcaaatgaaaccaccgttcgccagcggcgggtaaggcgcttcaaagtcgatcttgtcgtacgggttcaccttcttctccacatcgaggtggaaactgttggtgtagtaacctttatcggtcacgcccggcaccacgccaaactcagcagtatcgagacggcagaagcgatcgcacaggttttcactcggcgtgctgtagagactgaaaccataacccgtttcttctttccactgatccactgcctgacgcagacgttcaacaatggcgatacctttcgcgcgaagctgctcgttgtcgtaaacatgctcgccgccgaacagcgcgttaatggtttcgtggatgccgatgtaacccaggctaatagacgcacgaccgtttttgaagatttcagaaacatcatcgtcagcattgagacgcacgccacaagcaccttccatatagaggatcggggccacgcgcgctttcacgccttcgagacgagcgatacgggtcatcagcgccttacgtgccagcaccagacgttcatccagcagcttccagaaggtggcttcatcgccttttgcttccagagcaatacgcggcaggttcaggctgatcacgccgaggttgttacgaccatcgtggatctgctcgccgttttcattttcccacacgccgaggaagctgcggcagcccatcggagttttaaagctaccggtgactttcactacctgatcgtagttcaggatatccggatacatgcgcttgcttgcgcactccagcgccagctgtttgatgtcgtagttcggatcgccttttttatggttcaggccatcgcgaatcgcaaacaccagtttcgggaacaccgcagttttacggtttttaccgaggcctgcgatacggttacgcaggatgctttcctgaatcaggcggctttcccagctggtgcccaggccaaaaccaaaggttacaaacggcgtctgaccgttggcggtgtgcagggtgtttacttcgtactccagactctggaaggcatcgtagcactctttgatggttcgagagttagcgtagccttcggcgtccgggatgttccactcttctgcggtcttgcgatgtttgttgtagctggcagtgacaaacggtgccagcacttcatcgatacggttaatggtggtgccgccataaatatggctggcaacctgagcaataatctgcgcagttaccgcggttgccgtagagatgctcttcggcggttcaatctcggcgttccccattttaaagccctgggtcagcatgcctttcaggtcgatcaacatgcagttgaacatcgggaagaacggactgtaatcgagatcgtgatagtgaatatcgccacgctcatgtgcctgcaccacgtcacgcggcagcaggtgctgacgtgcatagtgtttagccacgatcccggccagcaggtcgcgctgggttggaatcaccttgctgtctttgttggcgttttcgttgagtaagctggcgttggtctgctcgaccagaccacggatctcctggttcaggcgaccgcgtttttcacgttcaatgtcgcgatcgtgacggtactcgatgtaagcacgagccagttgtttgtatggaccactcatcagctgattttcaactgcggtctggatctcattgatatccacctggttgcggccctgcatctgctcgctgacaaccgcggcaacagtggcgcaataatcggcatcatcgacttccgctgctttagctgcacgcagaatcgcttctttgatgcgctcacttttaaacggcactttgcagccgtctcgtttcatcacatgcggtgtcatgatcgctccatatttttaagaacaggttatccacagaaattgggaaaggcgttttccggttttttcgtttcgttttccggtgctttccgcaatcgccatccgcttatccacaacgccgcacctttttcgtggggagctgtagtagcaattatagtcgattaatacaacatattgggttgggacgcattttaaagtctatatatagtgctttgcatcaaggatgtttgagctttttttgatgtagctcaaagtaaaaagcagagcgtacggatgacgggcgctacagcgatatgtaaattttttaatgaatttgctggttgaaaaatcaacaaaaacaacatactgacagacaaaaccccggaatgaccggcattaccggggcttagggaagatttacttctgtaaccaccagacagcctcaaaaggccgtaaattcatggcacagggttgtggactggcttcttcgtagttatgcatcacaagctgccagttgccgcgcatttgccctgcctgccagggttggatctcacggctaaggttggcaatgaccagcaaggtttgccccttccattcacggcgatagcaccacaatacagggctgtttggcagcagatcctggtaattgccccatgtcaggatggcttcctgcttacgcagtgcgattaacttttggtaggtgtaaaacacgctggaatcatcggccagcgcggcttctacgttgatttgttgatagttatcgcccaggccaatccacggttcgccagccgtaaacccggcattatcgccgttgctccattgcatgggcgtgcgactgttgtcacgggatttactggcgaggattgccaataactcgtcggcatcacgcccatcgttgcgcagctcggcaaacatattgaggctctctacgtcgcgatagtcagtaatgcgcgtgaaatgcgggttggtcatgccaatctcttcgccctggtagatatacggcgttccctgcatgccatgcagcaccatcgccagcatttttgccgcaggcacgcggtattcaccttcatcaccaaagcgagaaacaatgcgcggctgatcgtggttacaccagaacaaggcattccatgctacgttgtgcattccttgttgccagtggcggaacaatgttttcaacgccacaaagtcaggtttagccagcgtccatttttcaccaccgggataatcgaccttcaggtgatgaaaattaaaggtcatgctcaattcactgcctgtcagagccgcgtatcgctggcaatgctcaaggctggtggaggacatttcacctacggtcattaacccgcgtggcgtaaacacatcgcggttcatctcgtgcaaaaactcgtgtgctcgtggcccgtcggtgtagaagcgacgcccgtcgccgtccaggtcttcagggaaacgcgggtctttggagatcagattcaccacatccaggcgcaacccgtcgaccccacgatcggcccagaactcacagacttttttcagctctgcgcgtaccgctggattctcccagttgagatccgcctgttctggtgcaaagagatgcaaatagtactgttcgctttccgcatgccagcgccacgcactaccgccaaatttactacgccagttgttcggtggcgtttctggttctccatcgcgccagatataaaactggcggtaagggctttctttgttcagcgcctcgcgaaaccaggcatgttgggtagaggtatggttaaacaccatatcgagaatgatacgaatcccgcggctttttgcctgcgtcaccagttcgtcaaaatcgtccagcgtgccgtaggtgggatcaatcgccgtatagttcgctacgtcgtaaccgttatcgacctggggagagacataaaagggggttagccagatggcatcaacgcccagtttatgcagatagtccaggtgttggataacgccacgtaaatcgccggtaccgctacccgtggtgtcctgaaaactctttggataaatctggtagataacgccgttttgccaccagtggggaagatgagtcattacgttattcctgcgaatgcgagggggcgcaattgcgccccgaagaaaattaaacaatgtccagcgtgcccaggcggtatttccgctgatagataaagctggtgagtacaatcgggatgatgatggcgatagccattgccagcgcaaacacctgccagtagctcggttgaatgctgagaattcccggcaggccgcctacgccgatgccattcgccataacgccgttcaggccgcatagcaatcctgccagaccagaaccaatcatcgcgcacagcatcgggaagcgatatttcaggttgatgccgtacattgcaggctcagtgaccccaagccaggcggagatagcggcaggcacggagatctcgcgttcattgtgcttgcggctggaaatgataatgcctatcacggcggagccctgagcgatattgctcagcgcaatcagcggccacactggcgtaccacccatgctttgaatcatctgcaaatcaatagcaagcgtggtctggtgtacaccggtgatcaccagcggggcgtacaggaagccaaacaatgctgcgccaatcggagcaaagctgccggtcatcaggtgacgtaccgcaaaggcaacgccatcgccaatcatgcgaccaaacggaccaatcagcgcatgggcgaggaacaccgcgaggatcaggctacagacgggtaccaccaccagatagaggtaatccggcacgatgcgtttaaggcgagtttcaataacgcccagcgccagtccggctaacagtgccgggatcacctgcgcctgatagcctactttggcgatgctgaacatgccaaagtcccacacttccggcagctgctgcccgagcagataagcgttcatcagctgtggagaaaccagtgtcacgccaagcacgataccaaggatcggcgtgccgcccatttttttcaccgcactccagcaaataccgaccggcaggtagaagaagatcgcttcaccgatcaaccacagaaaatcgtagatcgtttgcagggaagggtacatttgcgccagcgtctgaccgttgctcatgggcaaatcgccgatcacattgcgaaaaccgaggatcaaaccgccgctaatcaacgcgggcagcaacgggaagaagatcaccgcgaaatgagagatcaactgctcatgccatttcatattatgccgggcggctttttttacctgctctttatcaacctgcgcctgtccggtactcgcaatcagtgcttgatagtaatcacccacgttggtgccaatcaccacctgaaattgcccggcattggtgaaacagcctttcaccatagggagttgctcaatttctttcggtctggcattggccggttggttgaggacaaagcgtaggcgagtaatacagtggctcaccgtcgcaatattgccgcgcccgccgaccagttcaatcaaccgatcgatatccgtttggtttattttgctcatcataaagccccatggcagatgacatttttggttggctgcagaatatattgcgcggaaaaatttaaaaacgggaacgttcccgaaacgcagcgaagatcacaatttatcgttcaggaaacgatcaggacagggtggcggggatgatgatttgttgcggttcgctgcgcccggttacctgcgcgatcaactggcaagccgcctggcgtccagcttcggcgtaaccgggatctacggttacgatctccggatggaggaatttcattaacggcgtattaccgacgctcgccagttgcaaggtgtcgatgcgttgctcttgcaggtatttacttgcgccaagtgccagcgtgtcggttgcgcacagtaaggcggtagtttcaggcgtaatcacttttgcaacgttctcatagccttgcttcatagcaagccctggcagggcggcaacgggatgcagtttatgcgctttgcagaacgccaggtaggcttcgtgacgtcgcttaccggttgtcacgtcactgtgcggcacgccgagataactgatattacgatgcccctggtcatacagccgttgcatcaggattttgattgccccttcgtcgtcataacagacgctagcaaagccttttgcgtcacgcgccagcagaaccaggctactctgccagtgggctaacatttcttctgttatgccagtaaaaccgaacagcactacgccgtcgatattacgccgtttcagcactcccaaatgttcggcaactaattgcggggaaaactgactttccatcatgattgggtcgtaaccttgttcatagaacgctggcagcatggtttgaacggcgagattttcactcaagctatccagacgggtaacaatgatggcgaccactttatcgctttgcccacgcatagcgcgcgcagagcgggaaggggaaaatccatgctgattcatcactgcttcaacacgctcgcgggtgagctggctcacgccgctttcgttattcagcacccgggaaactgtagatttccccacgccgcttaagcgcgcgatatctttgatggtcagccgattttgcatcctgttgtcctgtaacgtgttgtttaattatttgagcctaacgttacccgtgcattcagcaatgggtaaagtctggtttatcgttggtttagttgtcagcaggtattatatcgccatagatgctacgaatattattggattctccttattatttgcggcgcttttttcacttaccggaggttatatggaacctgatcccacgcctctccctcgacggagattaaaacttttccggtaagcccgtcttttcacggcgttaccggatgcgtaaggccgtgacgttttaacgtccctgctcagctttattaccttcaggtaaggcttcgccacgcctgaagacatttctgtactgtttcagacagtgcggagggactccttatgtttaaagaaatttttacccggctcattcgccatttaccttcccgtctggttcatcgtgatccattgcctggcgcgcagcagacagtgaatacggtggtcccgccgtccttaagtgcgcattgcctgaaaatggcggtgatgcccgaagaagaattgtggaaaacgttcgacacccatccggaagggttaaatcaggcggaagtggaatctgcccgcgaacaacatggtgaaaataaattacccgcacaacaaccgagcccgtggtgggtacatttatgggtctgctatcgcaacccctttaatattttactcaccattctcggcgctatttcttacgccacggaagatttatttgctgcgggcgttatcgcgctaatggtcgctatttctacgttgctgaactttattcaggaagcacgttccactaaagcggcagatgccctgaaagcgatggtcagcaatactgcgacggtgctgcgcgtaattaacgacaaaggcgaaaatggctggctggagatcccgatcgaccagctggtgcccggcgatattataaaactggcggcgggagatatgatcccggcagatttacgtatcttgcaggcgcgggatctgttcgtcgctcaggcgagcttaaccggtgagtctctgcccgtagaaaaagccgctaccactcgccagccggagcacagcaatccgctggagtgcgacacgctgtgttttatgggcaccaccgtggtgagcggcacggcacaagcaatggtgattgctacaggtgccaatacctggtttggtcaactggcggggcgtgttagtgagcaggaaagcgagccgaatgcctttcagcaagggatcagccgcgtcagtatgctgctgattcgctttatgctggtgatggcaccggtggtgctgttaatcaatggttacaccaaaggcgactggtgggaagcggcgctgtttgcgcttagcgtcgcggtaggcctaacgccggaaatgttgccgatgattgttaccagcacgctggcgcgcggcgcagtaaagctgagcaaacagaaagtgatcgtcaaacatctggatgctattcagaactttggcgcaatggatattctgtgcactgataaaaccggcaccctgacgcaggataaaattgtgctggagaatcataccgatatctccggtaaaaccagcgaacgcgtgctgcatagcgcgtggttgaacagtcattatcagaccggacttaaaaacctgctcgatacagcggtgctcgaaggtacggatgaagagagtgcgcgcagcctggccagtcgttggcaaaaaattgatgagattccgtttgatttcgagcgtcgccggatgagcgtggtagtggcagaaaataccgagcaccatcagctggtttgcaaaggtgcattgcaggaaatcctcaatgtgtgtagccaggtgcgtcacaatggcgagattgtgccgctcgatgacatcatgctgcgtaagattaagcgggttactgatacgctgaatcgtcaggggctgcgcgtggttgcggtggcgacgaaatacctgccagcgcgtgaaggagattaccagcgggcggatgaatccgacctgatcctcgaaggatatattgcttttcttgatccgccaaaagagacaaccgctccggcactgaaggcattaaaagcgagtggaattaccgtaaaaatccttactggcgacagtgagttagttgcagcgaaagtgtgccatgaagtggggctggacgcgggagaggtggtcattggtagtgatattgaaacgctatctgacgacgaactggcaaatcttgcacagcgtaccacgctgtttgcccgcctgacgccgatgcataaagaacgcattgtgaccttactgaagcgcgaagggcatgtggttggctttatgggcgatggtattaatgatgcgcccgccttacgcgctgcggatatcggcatttctgtggacggcgcggtagatattgcccgtgaagcggctgatatcatcctgctggaaaaaagcctgatggtgctggaagagggggttattgagggacgtcgcactttcgccaacatgctgaaatacatcaaaatgacggcgagctctaacttcggtaatgtgttcagcgtgctggtagcgagtgctttcttgcccttcctgccgatgttgccgttacacttgcttattcagaacctgctgtacgatgtgagtcaggtggcgatcccgtttgataacgtcgacgacgagcaaattcaaaagccgcagcgttggaatccggcggatctggggcgctttatgatcttcttcggaccgatcagcagcatcttcgatattttgacgttttgcctgatgtggtgggtattccatgccaacacgccggaaacgcaaacgctgttccagagcggatggtttgtggtgggcttactgagccaaacgctgattgtgcatatgatccgcacccgccgtgtgccgtttattcagagctgtgcaagctggccgttaatgatcatgaccgtgatcgtgatgattgtcgggatcgcattgccgtttagtccgctggccagttatctgcaattacaggcgctgccgttaagctatttcccgtggctggttgcgattctggcagggtatatgacattaacccagttggtgaaagggttctatagccgtcgttacggctggcaataaagaataaactgggcacgatagccccgattcagattgtagacaaagtgagttttgttcatgccggatgcggcgtaaatgccttatccggccaacaaattcaataaattgcaggaatcacgtaggcctgataagcgtagcgcatcaggcgattttgcgtttgtcatcagacttaatccgggcatgatagcccggatttccatcaagattagcgacgaacagcgatcgcttcgatctcaatcttcacgtctttcggcagacgggcaacttcaacgcaagaacgtgccgggaaggtggcgttgtgttcggtgaagaaggcttcgtaagtggcgtttacggttgcgaagtcgttcagatcttttacaaacacggtagttttaacgatgtcgcccactttcaggccagcggcttcgacgatcgcttttacgttatccaggctctgacgtgcctgtgcagcgacgtctgccggtacttcgcccgttttcggatttaccgggatctgaccggaggtgatgatcatattgcccagatcaacgccctgtacgtaaggaccgatagctgccggtgcattttccgtcgcgatagttttgctcatgatttctcctttattacagcggtaaaaagtctggctcattatagggagccagacttttattaccaaccgcaattaattggccagcaccacattatgggaaaactctttttcacagtatttgcatttgagcgcgatatcattggcgcgttttcgcacggcaaagctggaactaaccggttcggcatggctgatacagttgctgttcgggcagaccagcacattgtcgatgcgctccggcagacttgggcggcttttacccaccacttcatagttgtcgatacggttaaccgtggcttgcggcgcatacaatgccagttgatctacttgatcttcactcaaaaaggtattttcgattttgatcagatctttgcggcccatctcgccagaaggcaggttcagaccaatggtgatgcgctgatccgtttcggtcagcttgaacagactcaacagcttaaaaccgatctgggcggggatatggtcaattaccgtgccgcgtttaatagcttcaacctgcaatttattatcgtgtgtcatctctatttccccttacagtaccagatcgcgattcagaaccagtgccagtaacgcctggcgagcgaaaatcccgttgcctgcctgctggaagtaccaggcgtgtggcgttttatcaacatccgtcgcaatctcatcaacacgcggcagcggatgcagcactttcatattggctttggcgttgtggagatcgctggcgcgaagaacaaactgcgctttcacgttggcgtactcggacgggtccagacgctctttttgcacgcgggtcatgtacaggatgtctacttccgccatcacttcttcaatagagctgtgcagactccatgcgatccctttttcatcgagcatatccagaatgtattgcggcattgccagcgcgtccggcgcgatgaagtaaaaacggttgccgtcgaacttcgctaacgcctgagtcagggagtgaacggtgcggccatatttcaggtcaccaaccattgcgacgtggagattgtccagacgcccctgggtttcctgaatagtgaataagtccagcaaggtttgcgtcggatgttggttggagccatcaccggcattcagtaccggtacattgccggaaaactcggtggccaggcgcgccgcaccttcctgcggatgacgcatcactatcgcatcgacgtaagtgctgataacgctaatggtatcggccagcgtttcgccctttttacccagacttgtattggcgctgtcggagaagcccaccacgctggcccccaggcggtgcatagatgtttcgaaagagaggcgggtacgggtagaggcttcgaagaaacagctggcaatgactttgtgcttcaacagctctggttgcgggtttgctttcagtttcgccgctgtcgccagcaccagattaaggtcatcgcgactaaggtcgtttatggaaatgatatgtttctgatatagcggattagccatcttttatctcctgacgcctgggcaaaaaaaagcccctcgattgaggggctgggaatgggtgatcaacgggaagaaaaacggcaggccagcgtcttttttcagacgcggtaagacaaaatgtcgaacacactgaaccatacatcctcccggcaaattgtccggcattatactcatcgtcagaagcggcgcaagcatttgatgcaatattttgtcagcgcaaacggtttatttgaattaaaagtcaaggtatatgcatttttatttgatgtgattctgcaggggaactgtccttcggtatcaataattgcagacattccctgctttttcctttttcactttcacgcaatcagatatgcattttattccattcatccgacttatagggcggagtgtgaaagcgaacggctaacactattgcttactgctcagggatgcgcgctatcactttaatttcaaaatcaaagcctgccagccatgtaacacccaccgccgtccagtttggataaggtggggcgctaaatatttcatttttcaccgtcatgatgtcttcaaattggttttctggatcggtatggaagctcgtaacatcaatgatatcgtcaaaagtgcatcccgcagctgccagggtcgcatgcaaattatcaaatgccagtctgacttgttgctgaaaatcgggttctggtgttccgtcctctcgacttcctacttgcccggaaacaaacagcaaatcgccggaacgaatagccgcagaataacgatgctcagcatatagactatgtcggccagcagggaaaacagcggttctttctaccatttggttatcctcaagatttacgacatgaacagaagatttctctttaccgggagccgcttttagcggacgacgtgagtaaacaaaacccagacatcatggataatggctgggcttaattgagcgtagtcggttatgcgccaaacgcgccatcaatggtatgcatcgcgccggtaacaaaactggcttctggccctgctaaccatgcgaccataccagcgacctcttccggttgcccatgtcttttgatagccatcaaactatgcaacatatcgcgcattggcccgttggcgggattagcgtcggtatcaattggccctggctggacgacgttaatggtgatcccacgcggtccaaaatcacgggccagcccgcgcgccatgccttgcagggcagatttgctggcggcataagcagccatgcctgcaacaggcatacgatcgccattcacggagccgatgattaagatgcgcccgccttcgggcatctgccgggcggcttcaacagaggcatgataaggagcatgaatattgattttgaaaaggcgatcaatatcgtcggcatttaattccagggcctcgccaaagacgccaatacctgcatttaccaccaggatatccaatgcgccgctcttacgaacgacatcaatgacagcgtctctgtcagcactatctgtgaatactgctgtcgctccagtctcttgtgccaggcgtttagcggcatctttgctccccgcataggtgaatcgtacattggccccatcggtgacgaaacgacgtacgatagcggcaccgataccacgactgccaccgaggatgagaactgtcttacctgtaaaagcgcccataaggactccttgatttattatgtaacatgcattacaaaactgttttaactttctgtcaacaggttttgtaatggtcactaaaaaacaatctcgcgttccaggtcgtcccagacgtttcgctcctgagcaggcaatctctgcggcaaaagtgctttttcaccaaaaaggtttcgatgctgtcagtgttgctgaagttactgattatcttggtattaaccccccgagcctctacgcggcttttggcagtaaagctgggttatttagccgtgtactcaatgaatacgtcggtacggaagctattccgcttgccgatattcttcgtgatgatcgtccggtaggcgagtgcctggttgaggtattaaaagaagcggcgcgcagatatagccaaaacggcggctgcgctggctgtatggttcttgaaggtattcatagtcatgatccacaagcgcgtgatattgccgttcaatattatcacgccgcagaaacgaccatttatgactacatcgccaggcggcatccacaacgcgcacaatgtgtgactgattttatgagtaccgtgatgtctgggctttctgcgaaggcacgagaggggcactctatagaacaactctgtgcaacagctgcaatggcgggggaagcgataaaaactattcttgaggagtgatgcgggccttgacccgaaaggcgggaaagcgcctgccgataagttgtgataagacaataattcacgcgttaaggctagcggaattgattatcttttcgtataacgatagaaatgaaacgttgttttaattaaggagtggaaaagatgatcatcggaaatattcataatcttcagccgtggctaccccaggagttacgccaggcgattgagcatatcaaagcacacgttacggcagaaacgccaaagggcaagcacgatatcgaaggcaatcgactgttttatcttatcagcgaagatatgaccgagccgtacgaagctcgccgtgcggagtaccatgcccgctatcttgacattcagattgtgttaaaaggtcaggaaggcatgaccttcagcacgcaacctgcaggcgcgccggataccgactggttagctgataaagacatcgcatttttgccggaaggcgttgatgagaaaacagttattctaaatgaaggtgattttgttgtgttttatccgggggaagtgcataaaccgctgtgcgcagtgggcgcgccagcccaggttcgcaaagcagtagtgaagatgctgatggcgtgatgacttttcgccgtaaataactcaaggtttacggcgagtttgtgaaaagagcgttttttgatatttttttgtgagtaaaatttgtaatgcttagacgttcttattcactcaaggagttcgtcatgagcaaaataagtgatttaaattattctcaacacattacattagccgacaattttaaacaaaaaagtgaagttttaaatacctggcgtgttggaatgaatgattttgcccgtattgccggggggcaggataacagaaggaatattctttctcctggagcatttttagagtttttggcaaagatatttaccctgggttatgtggattttagcaaacgctccaacgaagcgggtagaaatatgatggctcatattaagtccagttcttattctaaagatactaatggcaatgaaaaaatgaagttttacatgaataatcctgtaggggaacgagcggatagtcccaaggtgattatagaaattagtctttccactatcactactatggggactcgtcaaggacatacagccattatatttccacaacctgatggtagcactaaccgttatgaagggaagtcctttgaaagaaaagatgagagtagtttacacctgattactaacaaggttctggcgtgttaccaaagtgaagctaacaagaaaatagcgcgtctattaaataataatcaggagttaaataatctacagaaattaaataatctacagaagttaaataatctactgaagttaaataatatacaggggttaaataatcctcaggagttaaataatccgcagaatttaaatgattctcaggagttaaataacagccaggaattaaatagtccacaggagttaaatgatccgcaggagttaaataattctcaggacttaaataactctaaggtgagttgtacagttagtgttgattctacgattacgggtttattaaaagaaccattgaataatgcattattagcaataaggaacgaacatctgctattaatgcctcatgtatgtgatgaaagcattagttacttactgggcgaaaaaggtatacttgaagaaatagataagctctacgcattaaatgatcacggaattgataatgacaaagtaggtaacaatgaaattaatgacatcaaagttaacctgtctcatattcttattgattccttagatgatgcaaaggttaaccttacaccggtcatcgatagcattctggagacttttagtaaatccccatatattaatgatgtaagaatactggattggtgttttaataaaagcatgcaatattttgatgatactaaaaagataaagcatgcatgctccgtaataaatcatattaatcttcgcagcgatcagtctaaaatagctgagacattatttttcaatctcgataaagaaccctataaaaatagccctgaattacaggggttgatttggaataagttggttgtatatgtcaatgaatttaacttaagtaatcgagaaaaaacaaatttaatacaaaggctatttgataatgttgagtctatatttaatgaagtacctgtcagcattttagtgaatgatatttttatgaatgatttctttatgaaaaatcctgagatgattaattggtacttccctcagttacttaagagttatgagggtgaaaagatttattttgataatttaaaatatgatttaaatgataatgataaggaatctaataaagaaattttgaagaatcaaccagataatgttatcaaagaaaaactgaataatgaatacaaacttagatttagaatgatgcaaactatcttgcaaagcagagttaatgtattaccatatattaatgaacagcgtttaaataaactaaatccaccggaaaatttacgtatagcaatagaacactttgggtggaagaatagacctatcactgcataaaataatgtgatgccgggatggtttgtatttcccggcatctttatagcgatagcaattatttactgagcgtcgcgaccatcaccgctttgatagtatgcatacggttttccgcctgatcaaaaacaatgctggcggcagattcgaagacctcatcagtgacttccataccgccatgtaggccaaattcttccgccattttcttgccaagcgtcgtttggtcgtcatgaaacgcgggcaggcagtggaggaatttgacctccgggttaccggtcaactgcatcatcttgctgttcacctgatattcacgcagcaatgcaatccgttccgcccatttctcttttgcttcccccatgctcacccacacatcggtatagataaagtcagcaccttcaactcccttcgcgacatcttcagtcagcgtaatattcccaccattttgctgtgccagggcgcggcattccgtaaccagcgcagcttccggccagcacgcttgtggcgcgaccagacgcaaatccagaccggtaagcgccgcagcttcgagcatgctattgcccatgttgttacgcgcgtcacctgcatagaccagcgtcatttcgttgaacgctttgccgggcaaatgctcctgcatggtgagaagatccgccagcagctgcgtgggatggaactcattggtcaggccattccataccggcacgctagcgtattccgccagtgtttcgacaatctcctgaccatagccgcgatactgaataccgtcatacatgcgaccaagcacgcgggcagtgtctttaatgctctctttatgaccaatctggctgccgcttgggccgagataagtaacgcgagcaccctggtcatatgcggcaacttcgaaagagcatcgggtacgagtgctgtctttttcgaagatgagcgcgatgtttttaccagtgagtttggcttcttctttaccgcttttcttatcggctttcagcttcgcggctaactgcagcaggctgttgagttcagctggcgtgaaatcgagtaatttcaggaaatgcttatgataaaacccggacatagatccctcctgtggctaacgcctcaatgaattaaaattcaatttatatggatgattattcatttgcaagtctaaagcataaatctttgtcacaaaggtggaggcaatgtcagtggtgtgtgacaataagagtatcggcaggacattaagaggaatgagccatggcaaacccggaacaactggaagaacagcgtgaagaaacacgtttgattattgaagaattactggaagatggcagcgatccggacgcgctgtacaccatcgaacaccatctttccgcagacgatctggaaaccctggaaaaagcagcagttgaagcgtttaaactcggttacgaagtgaccgatccagaagagctggaagttgaagatggtgatatcgtgatttgctgcgacatcctcagcgagtgcgcgttgaatgccgatctgatcgatgcccaggttgaacaactgatgacgctggcagagaaatttgacgttgagtacgacggatggggcacttactttgaagatcctaacggcgaagatggcgacgatgaagattttgtcgatgaagacgatgacggagttcgccactaattaagcgtagcgcatcaggcccaggtagttcctgcaacctggtgaatttgtagcccggataaggcattcatgtcacatccggcataaacaaaacgtacgttgttaatgttcgaatgcccgcgagttgaacacgcgggcatttttttagagttcgcgcaacatccgcacttcacaatcgacatggcccgtgcagccaagcgcatagtcgatatgctcaaagcccaaatgctcataaagcgcaatggcttcctttaaaaaagcggtcgtttccagatagcagcgtttgaaacccatctctcgcgcctgctccatcgccattaaggccagtttttttgccagccctttgccgcggatagccggaagaaaatacatcttttgcagttcgcaaatatcgctctcactcccggttaatggcgctatcccaccgccgccgaccacttcaccctcgtactcaacgacccaatatgcatggccaggctgactatatacttgatacagctcgtcaagattcggatcggcgacggtgtagcctttatcagcggtaagaccgtattcggcggatacctgacgaatgacgcgggcgatagcaggattatcctgcagcgtcaggcgacgcattacaggactttgcggcgcaatgttattcatagtttaacccaataaaaataaagtaattatacatttgtttaataccactctcttcttacgtacgcaagcgacttataaagtaataaagtttttgccagcctattactgataagagtattgtaacgtggcagaacattttactgtctgtatatataagttatatcaatggattttttaattcagggaatttttatggctcaagttattaatgaaatggatgttccgtcccatagctttgtttttcatggtacaggtgagaggtattttcttatttgtgtggtgaatgtgttgttaacgattataacgctaggtatctatttaccatgggcattaatgaaatgtaagcgttatctttatgctaatatggaagttaacggacaacgattttcttatggaattaccggtgggaatgtttttgttagttgtcttttttttgtttttttctatttcgcaatcttaatgacagtgagtgcagatatgccgcttgttggttgtgttttgactttgttactgttggttttgcttatatttatggcagcaaaaggactgcgtcatcaggccttaatgaccagtctcaacggcgtaagatttagttttaattgctctatgaaagggttctggtgggtgacctttttcttgccgattttaatggccattgggatggggactgttttctttatcagcacaaagatgctacctgccaatagtagtagtagtgttattatatccatggttctgatggcaatagttggtattgtttccattggtatttttaatggtactttatatagtctggtaatgagttttctctggagtaataccagtttcggtatacatcgtttcaaggtgaaattagatactacgtattgtataaaatatgccattctcgcatttttagctttattgccttttctcgctgttgctggttatattatcttcgatcaaatattaaatgcgtatgatagttctgtatatgcaaatgatgacattgagaatttacagcaatttatggaaatgcaacgtaaaatgataatcgcgcagttaatctattattttgggattgctgttagcacaagttatttaacggtgtctttgcgaaaccattttatgagcaacctgagtctgaatgatgggcgtattcgttttcgcttaactttaacgtaccacggtatgctttatcgcatgtgtgcgttggtggtgatatccgggattacgggcggtctggcttatccactgctgaaaatatggatgattgactggcaggcaaaaaatacgtatttgctgggcgatttggatgaccttcctttaatcaataaagaagaacaaccagataaaggcttcttagccagtattagtcggggagttatgccttctttaccatttctgtaagagataaaaaaggccggagcatgctccggccttcgttttcatcactgtgttttgattacagcgcggcgataacagcctgctgttcaatcagtttcgctttcgcttccgcatagccttccagcttctcacgctctttcgcgatgaccgcttccggtgcgcgggcgacaaagccttcgttcgccagtttgttctcgatacggctgatttcaccttcaatcttcgccacttctttcgccagacgcgccagctcatcttctttgttgatgaggccagccatcgggatcagcagctctgcaccgtcgatgatcttcgtaacggaaaccggacctttgtcatcggcaggcagcacggtgatactttccagacgcgccagggtttgcaggaagccacggttttcatttacgcgacgttctgcatccgcgctgcaaccacgcagcagcagctccagcggtttgcccggcgcgatgttcatttctgcacggatgttacgtaccgcaacgatcgcctgtttcagccattcggtgtcggccagtgcggcttcatcaacctgagatgcatcgtactgcgggaacggctgcagcatgatggtgtcggcagtgataccgcaaagtactttcacacgctgccagatggtttcggtgatgaacggaatgatcggatgcgcgaggcgcagcagaccttccagtacagtcaccagcgtatggcgagtaccgcgcagttctgcttcggtgccaccgttcattaccggcttggtcagctcgagataccagtcacagaactggttccaggtgaactcatacagaatgcctgcggcgatatcgaagcggaagctgtccagcgcttcgcggtacgctttgatggtctggttgaactccgccagaatccagcggtccgccaggctcagcgtcatttcgccgccgttgaagccgcaatcctgaccttctgtgttcatcagcacaaagcggctggcgttccacagcttgttacagaagttacggtaaccttccagacgcttcatatcccagttgatgtcacgaccggtagacgccagcgccgccagggtgaagcgcagcgcgtcagtaccgtgcggctcaataccgttcgggaactgcttctcggtgcgcttacggattttgtccgccagctgcggctgcatcatattgccggtacgtttttccagcagttctggcaggctaataccgtcaaccatatccagtgggtcgataacgttacccttggatttggacatcttctggccttcgtcatcacgaatcaggccggtcatgtaaacggtgtggaacggcacctgcggtttgccattttcatctttgatgaagtgcatggtcatcatgatcatgcgggcaatccagaagaaaatgatgtcgaaaccagataccatcacgctggttgggtggaactgacgcagggcgtcggtattttccggccagccaagggtagagaaggtccacagcgcagaagagaaccaggtatcgagaacgtcttcgtcctgacgcaggacaacatcagcaccgaggttattttctttacgcacttcgtcttcgttgcggccaacataaacgttacccgcttcgtcataccatgccgggatacggtgaccccaccacaactgacgagagatacaccagtcctgaatatcgcgcatccaggagaagtacatgttttcgtactgcttcggtacgaactgaatgtcgccgttctcaaccgcttcaaccgccggtttcgccaggacatcggcacgcacgtaccactggtcggtcagcattggttcgataactacgccgccacggtcgccgtaaggaacggtcaggtcgtgcggtttaatttcttccagcaggccaagcgcgtcaactgcggcaacgactgctttacgtgcagcaaaacgctccagtttctggaactctgcagggatttcgctggaataaacgtcagattcgttacctttggtatcgaacacctgggcgctttcacggatatcgccgtcaaaggtcaggatgttgatcatcggcagggcgtgacgtttacccacttcatagtcgttaaagtcgtgcgccggagtgattttcacgcagccggtgcctttttccatgtcggcgtgttcgtcgccaacgatcggaatacgacggttaaccagcggcagaatgacatatttgccaatcagatctttgtaacgcggatcttccgggttaacggctacgccagtatcgcccagcagggtttctggacgggtagtcgcgaccaccagataatctttaccgtctgcggttttcgcaccgtcagccagcggatagcggatgtgccacatgctacctttgctttcgcggttttcgacttccaggtcagagatagcggtgcgcagtttcggatcccagtttaccaggcgtttgccacggtaaatcaggtcttctttatacagacgaacgaaaacttctttcaccgcattggacaggccttcgtccatggtgaagcgttcacgctcccagtcgacggagttgccgagacggcgcatctgacgggtaatggtgccgccagattccgctttccattcccagattttgtcgatgaaagcttcgcggccgtagtcgtgacgggttttaccttcttctgcggcaatcttgcgctcaacgaccatctgggtagcgatcccggcgtggtcagtaccgacctgccacagggtgtttttgccctgcatgcgctgatagcggatcatggtatccatgatggtttgctggaaggcgtgacccatatgcaaactgccggtgacgttcggcggcgggatcatgatgcagaaactttcctggctttcatcgccattaggcttaaagtagccctgcttttcccagtgctcgtaaagcggctgttcgatatcttgtgggttatatgtcttttccattatttccaggttgccgtattcaggttgaaaccagccacgcggtaggctttatagcgttcgcgcgccagttgtttcagagaatcttcataaggaacgaagtctaccacttctgtgaaagcggtggcaaaatctgcaaagcttgttcgcagactaatcaatatatcgcgccggctgctgctacgcttttgcggccaggcgatctccaccggtgcaccgccgcgcggtccttctcccgctaaattatgcggaacaaagctttctgccggacgcgcccacagggcttcatccagccggtaagcctgcttttcatcttcacaggcgatgagcacgcgcttaccgctgcgccaacgttctgcggcaatttcacacaccagttgctcaacggcgcttaagccatcgacggtggtgtcattgtccagaaggtagaacgtcgcgtttttcataaatggggcttcttgtggtggatttaaatacgcatcaggtatacaccgcagcgcctgatgcgacgctgttgtgtcttatcaggcctacgagttcagtgctgtgtaggtcggataaggcgttcacgccgcatccggcaataacagccttgcctgacgcaattactcttcgccgttaaacccagcgcggtttaacaggaactgtgccagcaacgctaccggacgaccggtggcgccttttgctttaccagaacgccaggcggtaccggcgatatccaggtgcgcccagttgtacttacgggtaaagcgactcaggaagcaacctgcggtaatcgccccaccaggacgaccgccaatgttcgccatatcggcaaaattggactccagttgttcctgatactcgtcacccagcggtaagcgccatgcgcggtcaccggattgttcagacgcggcaatcagttcatgggccagcggattatggttcgccatcagaccagtaatatgatgacccagcgcgatcacgcaggcaccggtcagcgtcgccacgtcaatcaccgcttccggctcaaaacgctcaacgtaagttaacacgtcgcacagtaccaggcggccttcagcgtcggtgttcagcacttcaacggtttgaccggacatggtggttaacacatcgcccggacgataggctcgtccgccaggcatgttttcgcagcctgccaacacgccgataacgttaatcggcagttgtagctccgcgaccatccgcatcacgccgtaaaccgctgccgcaccgcacatatcgtacttcatctcatccatgccttcactaggcttgatgctgataccgccggagtcgaaggttaaacctttacccaccagcacgattgggcgtgcatcttcgctcgcgttgcctttgtactcaatcacgctcatcaggctttcgttttggctaccctgaccgaccgccagataggaatgcatccccagctctttcatctgctgttcgccgataacgcgggtgatgacattcttgctgtagctgtcagccagctggcgcgcttgactagcgaggtaagcggcgttacagatattcggcggcatattgccgagatcttttgctgctttaatcccggcggcaatcgccagaccgtgctggatcgcgcgctcaccgctggtcagttcacggcgggtcggcacgttgaacaccatcttacgcagcggacgacgcggttcgctcttgttcgttttcagctgatcgaaactgtagagcgtctcttttgccgtctcgacagcctgacgcactttccagtagttgttacggcctttaacgtgcagctcagtcagaaagcagaccgcttccatactgccagtatcattcagcgtattaatggttttctgaataacctgcttgtactgacgctcatccagctcacgttctttgccgcaaccaataaggagaattcgctcggaaagtacattcggaacatggtgcagcaacaatgtctgccccggttttccttccagttcgccccgacgtagcagggcgctgatgtacccatcgctgattttatcgagctgttctgcaatcggagaaaggcgacgtggttcgaagacgcccacgacgatgcaggaactccgctgtttctccgggctaccgctttttacactaaactccatgcactacgctcctgaatcttaaagacaacggcggtggctacagatagaattgcaagctttcgtaactcatgtccgctgttgcgatgacttcgtgttaatcttaacgttattacggcattggcacgtcagaacaaaatctgagaggtgaatccgttgagtataattatcttagcgacgatttcgacgactcaagagaataaatgacgtttaagccatgaaacaagctaaaatcctgcaaaagacgagtttttacgggcgtatttaaagtgataatcataagatatctggtgcgggagacgctcaaaagccagctggcgatactcttcatcttgcttttgatcttcttctgtcaaaagttagtgaggatcctcggcgcagcggttgacggcgatattccggcgaatctggtgctctcccttctcgggttgggcgtgccggaaatggcgcagcttatcctgccattaagcctgttcctcgggctgctgatgacgctgggcaaactgtataccgaaagtgaaattacggtaatgcatgcctgcggcctgagcaaagcggttctggtgaaagcggcaatgatccttgcggtattcacggcaatcgtagcggcggttaacgtgatgtgggcgggaccgtggagtagccgtcatcaggatgaagtgttagcagaagcgaaagcgaaccctggcatggcggcgctggcgcaagggcaattccagcaagcgactaatggcagcagcgtgctgttcatcgaaagcgttgacggcagcgatttcaaagatgtgttcctcgcgcaaattcgaccaaaaggtaatgcacgtccttctgtggtggtggccgattccggacatttaacccagctgcgcgacggctcccaggtcgtcactctcaaccagggaacgcgcttcgaaggcactgcattgttacgtgatttccgcattacggacttccaggattatcaggcgatcattggtcaccaggcggtggcgctcgacccgaacgataccgaccagatggacatgcgcacattgtggaacactgacaccgatcgtgctcgcgcagaactgaactggcgtatcacgttggtattcaccgtgtttatgatggcacttatggtcgtaccgctgagcgtggttaacccacgtcagggacgcgtactgagcatgctgccagccatgctgctgtatctacttttcttcctgatccagacctccctgaaaagcaacggcggtaaaggtaagctggacccgacgctgtggatgtggaccgttaacctgatttatctggctttagcgattgttctcaacctttgggacaccgtgccggtccgccgcctgcgcgccagttttagccgtaaaggagcggtgtgatgcaaccttttggcgtacttgaccgctatatcggtaaaactattttcaccaccatcatgatgacactgttcatgctggtgagcctgagcggcattatcaagtttgtcgatcagctgaaaaaagccgggcaggggagttacgacgcgttaggcgcaggaatgtataccttgctgagcgtgccgaaagatgtgcagatcttcttcccgatggcggctctgcttggggcgttgcttggtcttgggatgctggcgcagcgcagcgaactggtggtgatgcaggcttctggttttacccgtatgcaggtggcgctgagcgtgatgaaaaccgccattccgctggtcttgctgacgatggcgattggcgaatgggtcgcgccgcagggcgagcagatggcgcgtaactaccgtgcgcaggcgatgtacggcggcagcttgctctctacccagcaaggcttatgggcgaaagatggcaacaacttcgtctacattgagcgggttaaaggtgacgaagagttaggtggcatcagcatttatgcctttaacgagaatcgtcgtctgcaatccgtacgctatgccgctactgcgaagtttgacccggaacataaagtctggcgtctgagccaggttgatgaatctgatctgaccaatccgaaacagattaccggtagccagacggtgagcggcacctggaaaaccaacctcacgccggacaaactgggcgtggtggcgctggacccggatgcactctctatcagcggtttgcacaactatgtgaagtatctgaagagcagcggtcaggatgccggacgttatcagctcaacatgtggagcaaaatcttccagccgctatctgtggcggtgatgatgctgatggcgctgagcttcatctttggcccactgcgtagcgtaccgatgggcgtgcgtgtggtcaccggtatcagtttcggttttgtcttctacgtactggaccagatcttcggcccgctgacgttggtttatggcatcccgccgatcatcggcgcactgttgccaagcgccagcttcttcttaatcagcctgtggctgttaatgagaaaaagctaaccgaatgaacgaataaagggagcgaaagctccctttattattgttagcaaagtgtgcttcgttcattcctgaaaaataattaaaattcaatatattgcagtggggtgggcatgataagacgcgccagcgtcgcatcaggcaaagacaaatctcgcctgacttaccttcttctcccccccagcaaactccccaacatcccgcgtacaatctgattcgtcacttggcgagcggcgcttttggccattgtttgcaccacaccatctttcttcccgccgcgtggtccggtagtgccgaacaaaatatccttcaatccaccaagaatgccgtcatccaccgctacctctttccctttcgcgggaggattattttgctgctcggtactggcctgaaagcctttttgcaacatctcataggcggattcccggtccacctcatcctcatatttgccatacaccggagagtgattaatcaagccattacgctcatcttccgtcaccggccccatccggctacaaggcgcgatcaccatcgcacgctccaccacagaagggcttcctttcgcatccagaaaagagatcaacgcctcgccggtgcccagttcctgaatcgccttttcggtatcaaacgccggattggcccgcatggtttgcgccgctgccttcactgctttctgatcttttggcgtaaaagcccgcaaagcatgttgaacgcgattaccgagctgcccgagcacattatccggaatatcagacgggttttggctaacgaaccagacgcccacgcctttactgcgaataagccttatcacctgctcaatcttatccagcagtacctgcggggcatcgttaaacagcagatgtgcctcgtcgaagaaaaacaccagttttggtttctccagatcgcccgcttccggcaattgttcatacaactcactaagcatccacagcaggctggcggcgtacagtttcggcatctgataaagtttctcggcgctgaggatattgataacgcctttaccgttggcatcggtgcgcatccagtctttgatatccagcatcggctcaccaaagaagtgtgctgcgccttgctgttccaggctcaacagcccgcgctggatggcaccaacgcttgcgctactgatattaccgtactgattctggaaggatttggcgttatcgccgatgtactgggtaattgcccgcagatctttaaagtcgagcagtaacagcccctgatcgtcagcaatgcggaagatgatattcagcacgccagattgcacatcgttgagattcaacagtcgtgccagcaacagcggccccagatcgctaaccgtcgcccgcaccggatggcctttctcgccaaagatatcccacaccaccaccggattggcatgcggttgccagtcattgacgccgatatttttaagccttgcgagcagtttttcgctcaccgttcctgcctgcgcgacgccggtcagatcgcctttcacatcagccataaacaccggcacgccgatttcgctcaaactctccgccagtttttgcagcgtaacggttttacccgtccccgttgcgccggtaatcagcccatgacggttagccattcccggcagtaaaaacagttctgtgtccggcgtgcgggcaattaacaggggttcactcatgagatatcctccagtttcctgcctggagtataggcaacgtccggcaaagagaatacgtgtaatgaagagaaaataacttaaagcgtgttgccgtgataaatctgatacccgaggtcaacagtgttgtggttgtgatcgttatttttaattttgctcagcaacatttgggcggccatccgaccaatatcaaaacggggagtaattacgctggcgaggcttgggatcatttgcctgccaatctccagcccatgaaaacccgcaatggaaatttgttctggcacggcgaggtttcgctcgcggcacagcagaagcgcacccatcgcaatatcgtcattggtgcaaaatacaccgtctaaatccgggtttgcgctaagggcatcacgcattaactgcattcctaaatgaatggaactgatggcgcgtggattcatgcgtaatggggaaagattatgcagcatcatcgcatcgcaatacccctgataacgctgttcatcgcgggtgtcatctttggaaccgagatacagaattttgtgcctgactcgcttctccagcatggtacacaccatgtcaaaagcggcctgccgattatcaaaaccgacctccatatccagccgttctccctgtacatccatcaattccacgaccggaatggtggcactacgcagaaatttcaccgtcctgatggtgtgatatttttcgctaagtataatcccgtcaatgttataagagagcaggttaatcacgctctcttcttcggaatcgcgatcgtaattgtaattagcaataagggtctgataattatgctcagaggtgacggattctattcccgcgagaatgtcagcgaagagttgattttgaaaactcggaatcaagataccgagggtataactttgtgcattcaacaacatgccgggagcgcgattagggatataattgatctcttccataattttggcgatgcgctcgcctgtttcctttgccacctttttcgggctgcggatataacgactcacggtcatttttgttacgccagccagcgtagcgatatcctgtaaagaaattctgtgattgcgcataacttctcccaacgtcgggggaatcttcaatcttcccccgaaactacatcacaatattttattctttcagtgcaatacggcgttaatggctaacacgcccagcaaacccataatagaaataagggtttccatcaccgtccaggtacgcaacgtttcaccaaccgtcagattaaaataccctttaaatagccagaagccagggtcgtttacgtgactcgcgatcacgctgcccgcaccggttgccagtaccattaaagcgggatcggcatgggtaacgttgataatcggcaacaccacacccgcggtggtaatggccgcgacggtggcagagcccagagcgatacgcaacagcgccgcaacagtccagcacatcaataacgggctaagtgtagttccggtcattaagtgactaatatagtgcccgacaccgctatctactaatacctgcttaaacgcgccgccgccagcgataataaacacaatcatcgcgatagcgcctatagaatccccaatgatatccatgatttgctcgatggtgcgtccattacgtcggcccagtgtgaaaatcgcaataacaatggcaataaacagcgcaacggcagggttaccgacaaattcaaagaagaggcgcacggtgttagttttcggtaacgtaatttcacaaacggcggcgatagccatcaggatgaccgggatcacggcagcgaaaatactgttccagaaggagggcatctcctcttcgctaaacagatgaggattaaataagccttccggtggtgctttctcaaagcgagttagcagtttagaaaacagcggtcctgcgacaataactgtcggaatggtaatgataaatccatacagtaaagtcgttccgagattagcctcaaagatagtcgcgatggcagtaggccctggatgtggcggcagaaaacagtgggttacagagagcgctgctaccattggtacgccaacatacaacaggggtaatccactacttgctacgatggtaaataccaacggcaacagcaggacaaaacccacttcaaaaaacatggcgaggcccacaaccagaccggtgatcactagcgcccattgcacgcgttttttaccaaaagtagcaatcagcgtagtggcgatacgttgtgccgcacccgtatcagaaatcagcttgcctaacatggccccgaaaccgaggatcattgccagcccgccgagcgtgctgccgataccattttgtatagagtgcaggacggcctgtgcatccatcccttcggcaaatccgacgacggcagctaccagaacgagggcaataaagccgttaactttaaagccgatcatcaggataagaagcagcgcgacgcctgccgcaataatgattaatggcatagtctttatctcttattagtgccagaaaagcagcgctttcgcgctgcacgtaggggggctgttaaacagccactaacatgccgccatcaacaaacaacaggtggccgtttacgaaatcagaggctttactagaaaggaacaccgcagcaccaatcagttcctgcggatctccccagcgtgcggcgggggtccgtttgcacaaccaggcggtgaaggcttcgtcctcaaccagtgctttagtcatttctgttttgaaatagcccggcgcaataccgttgacctgaatattgtggcgcgccagctcgacgcacatgccgcgggtgagcatttttaccgcccctttgcttgcggcataaggggtgatggtgtcacgtcccagttcgctttgcatgctgcaaatattaataactttacctgccttgcgttcaaccatgtgacgagttaccgcttggcttaccaggaacacggcggtctggtttactgcgatcacatcattccactcttgttcagggaactcagtaaaaggatgacggcgctggataccggcgttattcaccagcacatcaatggggccgatgtccttttcgatatgttcaacggcggcatcaatttcatgtttatgagtaacattaaaaggtgcggcaacggcctgaataccctcctggtggagtttttctacagcaagttctgcgcgttcggcagtaatatcattaataattatttgtgcgccatatttacccaggccggttgccagtaaaaagccaatgccctgtgcactaccggtaatcaagatattttttcctgccagactaaatagatcgttcattgtattattcctttatttatctcttagaaaacaagctggacttttgctgcctgggttttatcaccggcgaaacgtagcgcctcttccaggtcagtgaagggatattcagcactcagtaaaggcagtggattgataacgccattcgccagccaactcactgcggtattaaattcgctggtaaaacggaaagagcctctgagactaatctccttaccaatcaacgtcatcattgggaattctgccatcgcgcctcccatacctacctgcaccattacgccgcgtgcacgagtgacctccagacaggtattcacactactaggatgaccggacacttcaaagctgacatcgaaatagcctttttccgctttccagtgatccatgtcgtcgttttgtgggtttacgagcacatccgcccccatctctttgcccaggctaagggaacggggactcacatcagcacagacaatttccgcggcccccagtgttttcactgcactgacaatcaggcagccaatgggtccaacaccggaaataaatactcgcttgccctgtaactcgccggcctgatgtgcggcatgaatcgcgacggctaaaggttcggcaaaagccataaccttttcgtcagctttggccggataagggacacattggctcgtttcgaccattttataacgggtaaaaccaccatcaacatgagggaaatacatggcactgccaaaaaaacgcatatctgtacactgattctcgttatgttcaatgcagtatttgcagtgaccgcacggtttagacggattaatggctaccgtttgcccttcatgtaattcactactgtcgctatgaataactttaccgataacttcatgacctaacaccatcggtgcctttatcatgaaattacctacttttccttcctgataataatgtaaatcggaaccgcaaattccacctcgggttatttgtactaatgttccattattattccaatctatcgtctgctcggtaacggcaacagttttcttgcccgcaacaacgcaggactgtgttttcacttgcataaattcctcactggtcaggtagacacctcggaagcatttaagcggttttaactgtcattatttgtgatgaagatcacgtcagaaaattgttacattactatgttacgcataacgtgatgtgccttgtaattcttatcagtagaaataaaaaaacgtgaaattattatgccgccaggcgtagtatcgcagcaggtaagatgattcaggagattttaaatggcgggtgaaagctttattttgatgggcgttagtgggagtggtaaaacattaattggtagcaaggttgccgcgttattatctgctaaatttattgatggtgacgatcttcatccagccaaaaatatagataaaatgagccagggtattccattatctgatgaagatcgacttccctggctggaacgcttaaatgatgctagttacagtctttataaaaagaatgaaacaggatttattgtctgtagtagtttaaaaaaacagtatcgtgatattttacgcaagggtagcccccatgttcatttcctctggttagatggcgactatgaaactattctcgcgcgaatgcagcgtcgggctgggcattttatgccggtagcgttactaaaaagtcagtttgaggcactggagcgtccacaagcagatgaacaggatattgtgcgcattgatatcaaccatgatattgccaatgtcaccgaacaatgtcggcaggctgtgctggcgatacgacaaaacagaatatgtgcgaaagagggcagcgccagtgatcagcgctgcgaatgattttcaaaaatcggctttcaacaccacgcggtaacgcgccttaccgtcgcgcacatgctggatggcgtcgttaattttgctcatcgggaacagttcggtggtcggcgcaaccttgctgcgggcggcaaaacgcatcagcttacgcagctcataaggcgtgccggtagcagaaccagagacgctgcgatcgcccgcaattaacgtaaaggccggaacagacagcggcgtgagaaccgcaccgaccgtatggaaattaccgccataggtcagcgcctcaaaatagggctgccagtcgaggctgacgttgacggtgttgataatgagatcaaactgccccgccagtgctttcagtgcctgcggatcgcggctattcaccactttatcggcacccatcgccagcacttcctgctctttcgccggattagaactaaaggctgtcacctcgcatcccattgcgtgcagaagttttatagcgatatgccccagcccgccaataccaattaccccaacgcggctggtagcagtgatatggtgcatcaacagtggtttaaagaccgtgataccgccgcacaacagcggcccggcggactcgatatcaatattttctggcagtggaatcacccattgccagtccgcacgcaacttctcggcaaagccaccgcgattcataatcgtcggcaccgcaccttgctcgcagttgatctgattaccgctaatacaggcgtcgcagtgaccacagctacgcgccgtccagccaatcccgacacgctgaccgacctgcaaacctttatcctgcgcggcgctcccgagtgccaccacgcgcccaatcacctcatgcccggcaaccagcggatattgactaaatccccattcgttatcgatcatgctcagatcggaatggcagatcccgcagtaatccacctgcacttcaacatcttgtggcctcagctcaccgggatcgtactcataaacttccagttcgccgcccgcttcttttgcggcatagctttttatcatgctcattttttggtccttctctggtgttgtttgggaagtgtagagcatggcagggcggggtgcctggagtgtgacaaaggttacacatcgctgtatgcaatgctgaaaatttcagcacttagcgaggtgcgagcaagctggcgcttgcatggtggcgtgcgacaggtataatccacaacgttttccgcatacctcttcagtgccgaagtggcgaaatcggtagacgcagttgattcaaaatcaaccgtagaaatacgtgccggttcgagtccggccttcggcaccaaaagtatgtaaatagacctcaactgaggtctttttttatgcctgaaatccagtgtttatctatctttcccgctatattaactctctcaaggtcaaccgatatcaacgtacatctaccaacatatgttggtacagatgatggtatttccggttcgataatgcttgtaccaacagggagggaatacgagaaatcacaggacattgctaatgctggtacgcaatattacctgaagctaaaaacctgcacgttagccctttgtaggccagataagacgcgtcagcgtcgcatctggcataaacaaagcgcactttgctggtctgttcccctcaccctaaccctctccccggaggggcgaggggactgtccgggcacatttttagactttgtcatcagtctgagcctgccattggcaggctctggtgtccttttacgctaccatgctaataatcagcacaataatcagcccaaccacggagttgaccagctccagcagaccccaggttttcaacgtgtcttttacactcaggtcaaagtaacctttgaacaaccagaaagatgcatcgttaatgtgggtgagggtgttggaacccgcagccgtcgccagtaccagcagcgccggattcacgccaaccagctgaccagttgctggatctaggattgcagcactgataatcccggcggcggtcatcgcgctaacgacaccctgacccgtcgccagacgaattagcacagtgatcagccatgccatgatgtaggggctgatattgccgtgggacatcaacatgccgatggtgtcgccaatgccggtgtcgatgatggtctgcttcagcacgccacccgcaccgatgatcagaatcaccattgcaatactcttcaccgcgctttcaaaagcgttcatcacccactgcatgtcatgaccacgtgcggtgccaaagagtacgaatgcaaccaccatcgcaataaacattgcaatcgggctggaaccgataaagttaaccacttcccaggcaggggtatcttttaccagccagatattggcgatggtggtagagatcataatgatcgccgggatcagcggcaccagaatgctaacgccgaaagagggcagattattcatatctaccggttgatctgctttcaggaaacttggcgttgggcgctcaagattgccgaggaacttcggcaggatcagacctgcgcagattacacttgggatcgtcaccagtacgccatagatataaaccatccccatatccgcgccataagcattcaccagcgccaccggacccggctgcggtgggaacagactatgtgcggtagtggcagctgctactgccgggatcgccagtttcaggaacggaattttagcttcggcggcaataacaataaccagcggcgctaacatgataaaggccacttcatagaacatcgccagaccaaaaatcaggccgatgataatcacgctcagctgtacatagcgcagaccgagacgcgccagcagcgtatgcgctatctggtgagccgcgccggagtcgaccatcaatttaccgatgaccgcaccgaacaccacgatgatagccagttcccccagcgtgttgccgaagcccgctttcatagtgtgcagcaggctcatcaaatccatgcccgccagcatcccgacggacagcgccgccaccaacaaagccaccatactattgattttgaacttcaaattcagtaccagcatcagaccaatgccgaataccacccagagaatgttaagcacatgcataacgttttaccttacctggttgaaccgttgttattttgggcgatatgttatgtaaattggtcaaccattgttgcgatgaatgtcacatcctctgatcaataaccatcgattaccctttgctgcaatttgcagcaacaaccatgagagtgaaattcttgtgatgtggttaaccaatttcagaattcgggttgacatgtcttaccaaaaggtagaacttatacgccatctcatccgatgcaacgccacggctgcggtctggttgttcatccggatacctaaacaactccagggttccgcgtctctttgctgtggaacccactatgtgaaagaggaaaaatcatggaacagacctggcgctggtacggcccaaacgatccggtttctttagctgatgtccgtcaggcgggcgcaactggcgtggttaccgcgctgcaccatatcccgaacggcgaagtatggtccgttgaagagatcctcaaacgcaaggcgatcattgaagacgcaggcctggtgtggtctgtcgtagaaagcgtgccaattcacgaagatatcaaaacccacactggcaactatgagcagtggatcgctaactatcagcagactctgcgcaacctggcgcagtgtggcattcgcaccgtgtgctacaacttcatgccggtgctcgactggacccgtactgacctcgaatacgtgctgccagacggctccaaagctctgcgcttcgaccagatcgaattcgctgcattcgaaatgcatatcctgaaacgcccaggcgcggaagcggattacaccgaagaagaaattgctcaggcagctgaacgcttcgccactatgagcgatgaagacaaagcgcgtctgacccgtaacatcattgctggtcttccgggcgcggaagaaggctacaccctcgaccagttccgtaaacacctggagctgtacaaagatatcgacaaagcgaagctgcgcgaaaactttgccgtcttcctgaaagcgattattccagttgctgaagaagtcggcgtgcgtatggctgttcacccggacgatccgccgcgcccgatcctcggcctgccgcgcattgtttccaccattgaagatatgcagtggatggttgataccgtaaacagcatggcaaacggttttaccatgtgcaccggttcctacggcgtgcgtgctgacaacgatctggttgatatgatcaagcagttcggtccgcgtatttacttcacccatctgcgctccaccatgcgtgaagataacccgaaaaccttccacgaagcggcgcacctgaacggtgacgttgatatgtacgaagtggtgaaagcgattgttgaagaagaacaccgtcgtaaagcggaaggcaaagaagacctgatcccgatgcgtccggaccacggtcatcagatgctggacgacctgaagaagaaaaccaacccaggttactccgcaattggtcgtctgaaaggcctggccgaagttcgcggtgtcgaactggcgatccagcgcgctttctttagccgttaatatccaccggcatggctgcgcgccgtgccggttccttcttccttgccgtcactctttgaagacggattctggagtttacgatgactactattgttgacagcaatctgccggttgcccgcccgagttgggatcattctcgtctggaaagtcgcattgtgcatctcggttgcggggcgtttcaccgcgcgcaccaggcgctgtatacccatcatctgctggaaagcaccgacagcgactggggcatctgcgaagttaacctgatgccaggcaacgaccgcgtgctgatcgaaaacctgaaaaaacagcaactgctgtacaccgtagcggaaaaaggcgcagagagcaccgagctgaaaattatcggtagcatgaaagaagcgctgcatccggaaatcgatggctgcgaaggtattctcaacgcgatggcgcgtccgcaaacggcgattgtctctctaacggtcacggaaaaaggctactgcgctgatgcggcaagcggtcaactggatctcaataacccgctgatcaagcacgatctggaaaacccgactgcgccgaagtccgcgattggttacatcgtcgaagcgttgcgtctgcgtcgtgaaaaagggttgaaagcgtttacggtgatgtcctgcgataacgtgcgtgaaaacggtcatgtggcgaaggtcgcggtactggggctggctcaggcgcgtgacccgcagctggcggcatggattgaagaaaatgtcaccttcccgtgcaccatggttgaccgcatcgttccggcggcgacgccagaaaccttacaggaaattgctgaccagctgggtgtttacgacccgtgcgccattgcctgcgaaccgttccgtcagtgggtgattgaagataacttcgttaatggtcgcccggattgggataaagtgggcgcacagttcgttgcagacgttgtgccgttcgaaatgatgaagctgcgtatgctgaacggcagccactcttttctggcgtacctcggttacctcggcggctatgaaaccattgccgacaccgtgactaacccggcttatcgcaaagcggcctttgccctgatgatgcaggaacaagcgccaacgctgagcatgccggaaggtacagacctgaacgcctatgcgacgctgctgatcgagcgtttcagcaacccgtctctgcgtcaccgtacctggcagattgcgatggacggcagccagaagttaccgcagcgtctgctggacccggtgcgtctgcacctgcaaaacggcggcagctggcgtcacctggcgctgggcgtggctggctggatgcgttacacccagggcgtggatgagcagggtaatgccattgacgtggtcgacccgatgctggcggagttccagaagatcaacgcgcagtatcagggcgcagaccgcgtgaaagcgctgctgggcctgagcggtatttttgccgatgatctgccgcagaatgccgactttgttggcgcagtgacggcggcatatcagcagctgtgcgaacgcggtgcgcgcgagtgtgtggctgcgctgtaactaactgattaccctacagacttactggtcaatcaaactgatatttggttgaccagttttcgtttttttgcccacctgtacgtgccaacttccagtgctaatggtatagtttgagattaacgggggccgtaaaattgcccgttgtaggccggataaggcgttcacgccgcatccggcaaaaatttgattaaccgcacctaacggacacaacaccatgaaatctgccacctctgcgcaaagaccttaccaggaagtcggggcgatgatccgcgatctgatcataaagacgccgtacaatcctggcgaacggctgccgccggagcgtgaaattgcagaaatgcttgatgtcacgcggacggtggtacgtgaagcgctgatcatgctggagatcaaagggctggtggaagtacgccggggtgccggtatctatgttcttgataacagtggcagccagaacacagacagtccggatgccaacgtctgcaacgatgccggtccttttgagctgttacaggcgcggcagttattggagagcaacatcgccgagtttgccgctttgcaggctacccgcgaagatatcgtcaaaatgcgtcaggcattgcaactggaagagcgtgaactggcttccagtgcgccgggcagcagcgaaagcggtgacatgcagttccatctcgctattgccgaagcaacgcataacagcatgctggtggagctgttccgtcagtcctggcagtggcgggaaaacaatccaatgtggatccagttgcacagccatctggatgacagcctgtatcgcaaagagtggttgggcgatcacaaacagatcctcgccgcgttaatcaaaaaagatgcccgagcggcgaagctggcaatgtggcagcatctggaaaacgttaagcaacgtctgctggaattcagcaacgttgacgatatttattttgatggctatctgtttgatagttggccgctggataaagtcgacgcctgacttattataataagcgcaagggtaaacgttccttgcgctttcttaaattaagaagtcgcaatgagtattactttgtaaattgcagggtattgtttagctatctgtataacctgaatgttagtactcattcttcctggtagtaaggcgagattattaaagttgccatgcagcgtccggggaagtgttgggcgctgttttttttgtttcttaataatgtgttgtaagccgtagaaggcgtgtaggtcgcaccctatgcgacctacacatcagtcaggaattacccttcacgttctaccactttaatttccaccatgccgatcccgagcttacgcgggctgtgtccgaggatattcccttcgttggtactgacaggttccggcggcacaattaccagtgtgtcggcatcggttgggttatcgaaatgcagtgtggtggtggtcacttcattgcccagcacaagagtttgttcttcattgcctacgcgtaccggaataggacggctggcgttattgccgtatgctttggcggtaatcaccaggtcaaatttcttcggcagcggatgcttgtactcgatttttacttcatcgcccagctgcgcgttggaccagcggccccagctctccggacgggaaatcccgctaaactgtttcacctcttctggcgcaccggcgacgttaaagatgaaactgtcggctttgtagcgaatatcgttatcaacaatcttcagcgtatcgacattgcctttgtaacgcgccatgtcgatgaccgtatctttaaatgccgttttgccctgccatgttgttttgtcaacatgctgaacaatttgctgaccgccaagctgcccttggctgacacaccagtcggtggaaagtgccagttccggagcccagagttgtgccatcttgtagcaacggtcaacccagacgaaattgtcgcgtggagcgaaatcggccagctggaaacgcagcggtgcactgtattcgctttccggcagcggttccacgcgtttgtcactaacccgcaacagcagcggcaaacggaaatggctaccgctgaaggcaatcatgtttttctgctggtcgatggtgaactctttcatctctttagggaatttccacaggcggatgatatctggcttccacgccaatgttttctctttgatattgaggaagatttcgctcatgctctgcccggataaactgctacgaccaagtccgagatagttatcgccaccgagaatgtccagcaccgtcgcgccgttatccatcgtgttacgcttcactgccagcgtctcttgctgcggcttgtcgccacgaatgacaaaaaacaggttattgcgatcctgcttattgaggtatttccacgccgtgttgttcatcgctaaatggtcagaagagacgacgatgacggtatctttaaaccacggactcgctttgattttgttgataaacgtcgcgatgttctcctggctgcaacttaccgcgctgaaactctgattcggtttaccgtcaaaatcatattttttgcggttacaggtacgagagataaaaccatccgggtgatgggtatcgactgtcagggtaaacagactgaatcgctgaccactgcgggaaagctcttcaaactttttccacgcttcatcgagaacggtatcgtcgtagaatccccagtcgttgcgatagtgcgggtcggctaccacgcttttcagctcttcactgccgtataagtggtcgaagccatggctcttcaggaacacatctttaccggcaaaacgcagattcgcgccctgcacgaaatagttctgataaccgctgtttttcaggatatctcccagacagatgttctgcgggaagaagctggagacagaggcggaggcgttgccttcaaagggggcaaacagcggtatgccgcactgagaagccaccatgcccgcaatcgtgtaatctgttcccggcagctgctgcgtgtggctgaaatccaggccttcatttttcaacgcgcccagttcaggcgtgagatccgggaaagcctcgttatcaaaataggtccgctcgagactttcgccgtagatataaaccaggttgagtttcgggtcagggatagttttgctcggctctttataataagccgcaaagtccgggtcgccgtcgcgactctgggatttcaccagttccgttatctgacgaaatgccgggctggcgtccacgctacccagcgccagtaagagcgccagcaggctgtaaccaaaatggtgcggatgatggcgacgacggcgcaggatccagcccagcgcaccgaacaccgctgtcagccccagcacaatgccgatacccggcaaaatgtatttgctgacgccagcaccggtcaggctgttggttaaggtatagagaaccgcgtcgttaataccatcgccagtaaaatagtcgctggcaaacagggtgatatttaaaacgacaaatagccccagcaccgttaacgtggctgcaaaccaccaggtgttacgtcccgctttccatgcgtaaatcagcacagaggcgagaaaaagggcgaaagagagtagttcactcaacgggcgatcctcactaaaccgggccgtttagccaacgtttaagctttttgagaagcacaatgtaatggcgtcgccatattgctgcaattctagtgtcaaaaaaatgcgatgttgttaggaattagtttataaacagacttttttgattacggtcacttcccgtgtaacaggggtaaaaccgtccaggagcagggaaaagggcaggagagagccgcgtcagccgggtaacagctaaaacgcggcgtttcgcggttcaggaaatgaagttcagcccctgttttaacaccagatcgcaggctttggttttcaccttttctgccagcggagttgttccgatgttatccagattgagttgctgaccatctttggttttcagcaaaccctgaatgccgtccagatagttggtgtcttctttttgctcttcactgttcaggcccagcttttccagcacctggttcttgatgttttcggcatcggttacgctcgccagcttttgcttcgcgcagtattgcagaatgcctgcggcattgttcatgttatctgcgcttaaggcctggtttccgctgctaagcaagttagttaaactcgcgaggctccaaccgccttcctgtgtcgtgctgttttggttgccaagttcgctggcggcgctggagagcgcatctttccaggacgcagcatgcaccccggtggaaattaatgcgctggcggcaatggcacagcacagaagatgtttaacagttttcatcatcattactcaaggtggaattgtgtcgcagtataccgccagaaacggggattaatactctttacctgttacccggctacggtagctatcccagttgaagatcacccacaaactgttacccaggcgcatacggtccatcacgcgttcgcccagcaacttggtcatctcttccatattactgttggtcagcatcccggttgggcgtttggaagaagagcggcgatcgacgatctggttgatgatcactttttcgtatttgctttcggtctgcacgccgatctcatcgatcaccagcagatcaacgttgctcagatcgttaagcagttgttcttcgctggtaccgctattcctgaaggtatctttcatcgcgctcataatatcggccacggtgatgatcaatacggatttaccgcgtagcagcagctcgttgcagattgccgccgccagatggtttttgccggttcctggcttaccagaaaagatgaagctggcgatgttgccgtcaaactcttcgacatactggcgcgctttgcttaacgcattcatctgcccttcacactcaacgcgatagttctcaaaggaacagttctgatgcagtggacgaataccggagcggttaaaggtgcgctgcattttcatcgcccgattttcacgttcgagagcggcggagcggatcgctccttgttctttttgccaggccagtagttcttcacccgttttgaatgcgggtttgatatgggcaggcatcattttttgcaggcgttgcatcaggtcgccaacgtttttcatcgttaccctctgaatcctggtggaatttggctgtcaggttcgctgaccgtattcacatctcgtttcggcagtccgccgttgctggcacgaccgatttgcaggctgcgcgccagtttttgttgccactgcacatggtgaaagactttaccttccgcctgccagtaggcaatgaaactggccagttcttcggtggtcaccggctctcttagcgccacgccccatagcgccgccaggcggataaaatcggcatcgggttgccagtccggatacatggcgaatttccccatgggtacagcaacgggagcggcttgcggttcctgatagagttgatcgtccagagcgacatcgcttcccggacgcgccagcttttcttccagcgccagcagttcagccaggcgtgcaggcgtgacggcataaaacgccggggcattgttagcaaatacggcaaccacaccgccttcagcttttgccagaacggtttggtgatcgtgtaccagggcgtcaataccaacgacgtccggggtcaaaactctggaagacatactgtttctcaaatatggaacgatgaacgagaagggagataacttttatagtaacacacggaggagaggaggctgtctctcatccgtgtgcttaagcgaggcaattttatacgcgagggcgcttgcggtacaaccataatccaggaatggaaagaccgatggataacgcaccaacaatgctactagctgtaagaaagttggttaacagggtaatcatcaacggttcgctgtaacctaactggctgatttttaccgcgctaatcattgcggtataagcgcttatgcccgggaacatagggataacggccgccacggtaaacactttcggatgcgccagataccagcggctccattgaataccaatggtaccgaccagcatagaagccataaaggtactccactcaatattcaacccgctggtcatcaagatcattcgggaaccatgacctatcgagccaagcagcgcacaccagcgtaacgcccgcacgggaacgttgaacaccatcgcaaagccgaccgcaggaatggcggcgaggatcatatcctgcgccaacgctaacagaaattcgatcacacccatccgcgtagcccccaaatcgtcagtgccatcactacgccgacgcaggtagccagtgtcagcagactggcgatcgcccagcgtgccagtccggtattgatgtggcctttaaacatatcggcgacggcattaatcaacggaaagcccggcactagcagcagaacgctggcggccatcgcaatggtgggggtattgctgaaagtggggagttgcaaaagcaatccggaaatggtggtggcggcgaaagcggtaaggcaaaagttgatctgtggatgaagatgacgttgtgccagcagctggcggatatacatcgcggtcgtactggcaaagaaggtgatgacggcaccatcccagccaccgttattgagtttacagaaacaggcgcaagaaaggccaaccattaaggctaccagccatcttgggtaacgtaatggctgaatttggctaaatcgtttctctacgcctttgtaatccagcagatgatgctccgcaagaatcacaatgtgctggacttcagtcaccacatgcatattaatgccgcgatcgtgatttttacgtgtgcttgtcaggcattgcccatctttaatagttgtcagcactatggcgttgctagagatagaactttcgacgctgtccattcccagtgcccgacccagtcgactggaaagctcatcaaccaacgcgctttccgcaccatgttgcaaaagaaataatccacactggatacaaagccgtgttacggctcgctgttgctcagtttgcataactcgccctttgtcatagacgtgctgcgtattgttcagataatgagaatccatttgtatcatgaagcacggttgttttgcggtaggttaagatcaaaattgcgctgattaatcctggttatcgggagaagctcggtgataaaaagcgaattatctctcgccgcaaacaaactatcacatgaatattatcatcataatgaatttattgtttggcctttacgaatcaggataatagataaccgggcacgttttttaatgttaacaagctaaaaccatcagatttcattgaataaatattggttgtgtgattttgcattctgcgggaagggatatcatttaattataaattaaatgaatgtgatttctgtttttcattaagtattcctaacaacttaatgtagatattttaaatgtctccaggctatttcaccaggttatcatttgatgctaaccttctgacacatgcagtggagttgttgtgcagcaggagtatgctgatatgaaagtgaatgctaaggataatttattcgcttaatctattaatttgctggaaacatttaaggaatgaatatcctgaataaaccatcataatttttagacagtggatgtggaggaaatatgttgccaggatgctgcaaaaatggaattgttatcagtaaaatacctgttatgcaagcagggttaaaagaggtcatgaggactcacttccctgaatatgaaataatatccagcgcctctgcggaggaccttaccttattacaattacgtcgttccggattagtcattgctgatttagccggtgaaagtgaagatccacgttctgtttgtgaacattattattctttaatcagtcaatatcgggaaattcactgggttttcatggtgagtcgctcctggtattcccaggcagtagaactgctcatgtgccctacggcgacgttattgtctgatgttgaacccattgagaatctggtcaagaccgtacgttccggcaatacgcacgcagagcgtatcagcgccatgctgacctccccggcaatgactgaaactcatgattttagctatcgctccgtcattctcactcttagtgagcgcaaggtactgcggctattaggtaaaggatggggcatcaaccagatagctagtttgcttaagaaaagtaataaaactatcagcgcccaaaaaaacagtgcgatgcgtcgactggcaattcacagcaacgctgaaatgtatgcatggataaatagcgcgcagggtgcaagagaacttaacttgccttctgtttatggagatgccgcagaatggaacacagccgaattaagaagagaaatgagccacagttaaaaaaatgcgtcatgagtagtatcggtattgagagtttattcagaaagtttgcgggtaacccttataagctccatacctataccagtcaggagagttttcaggatgccatgagccggatcagctttgcggcggtcattttttctttttctgccatgagaagtgagcgcagagagggattatcttgcctgactgaactggcgattaagtttccgcgtacccggcgtttagttattgcggatgatgatattgaagctcggctgattggtagtttgagcccaagtccgctggacggtgtattaagtaaagcgagtacgctggagatttttcatcaggaactctttttgagtttaaatggtgtacgtcaggcgaccgaccgactgaacaatcagtggtacattaaccaaagccggacgttaagcccgacggagagagaaatattgcgctttatgagccgtggctacagtatgacacaaattgccgagcagcttaaacgcaatatcaaaacgatccgtgcacataaatttaatgtgatgagcaaactgggcgtcagttctgacgcagggttgttggaggccgcagatattctgttatgtatgcggcattgcgaaacaagtaatgtgttgcatccctattaatccgcatgatgccgggtttacttccccggcagtgctttcatttcagcgtacaatcgccacattgctgcacatccggtaagcgataacgctggcagcaagtgcggcgcaccagcaggccgtcgcgcagtaccacggtacgccagagtggattatcttcaccgttcgtgagcgttttctcaaaaaagagggcatggcgcaggctttcaacagtagcctcgccgagcagttgcttcatctcagtgagataccagttgatcaaataaccggtattactccagataagtttgccgttgatctctccggtcgcttctagtgcttgcacaaccggaaccagcgcctggctgattaacgtttccattcgatgctgcgggctatgtggtgttgcgtttttatcttcacacacatcgacccagaaacaggcgacgcgtccggtttcgtgaaactcagcatggaaatgttccgggctcacatctaatgccttttcctgcgtcagtagcgccagcattaatggtggcaccatcaggccgatataccattgtgcccatagactgatcagcggtttgttctcgcggatcatcatcggttggttgcgatagatatgatcggaatagaccgccagcagagaacttagcacattcggactactccattgcgccagcgtcatggcgttaagtggggcaggttcatccaggcggataaactccagcaaatgttcacgatgttttgcgatcgtcgcccgcacggcttgcgcaagcgtgggatcctgcggctggagatgcgttcgccagatgacatcttcatagagcggtgcggaacgataggccataatcgggatagtaatctaaatgataatgattgctaatcatagcgataggtttacccgatagcaagggatttatctggcttgcaaatgataaaaattatcatatgatattggttatcattatcaatgaaagagatgaaatcatgttgcaacgtacgctgggcagtggctggggagtgttgctgccgggattgctgattgcggggctgatgtatgcggatttaagcagtgatcagtggcggattgtcattctgatgggattagtattgacgccgatgatgctgtatcacaaacagttgcggcattacattttgctaccaagctgcctggcacttattgctggcatcatgctgatgataatgaatttgaatcagggatgaaaaatcaaggaagaaacaagaaaggaagtaaagataattggtgcgaggggggggacttgaacccccacgtccgtaaggacactaacacctgaagctagcgcgtctaccaattccgccaccttcgcacagtcatcttactttttttgatatcgcctcgtttggtgcgaggggggggacttgaacccccacgtccgtaagaacactaacacctgaagctagcgcgtctaccaattccgccaccttcgcccagtgcgagcaatatcaacgtggtttttggtgcgagggggggacttgaacccccacgtccgtaaggacactaacacctgaagctagcgcgtctaccaattccgccaccttcgcataccatcaattcttaaaaagaattgctaccacggaggcgcattctagtggttttcagcttttcgtcaatagttaattatcgacagaggtgtaattgctggaaaaatgtccatcaggaaactagcgtgcaggtttggtatgcatgcgggggcagatgccagatgcgacgctggcgcgtcttatctggcctacgaagggctaacgtgcaggttttgtaggtcggataaggcgttcacgccgcatccgacacggtattcggcgagataattaacctttcttcgcctggcgggtcataatggcgcgatacaccttgaagcgccctgtttgcgcgatcacttcgtggaagccaaatgtctcatccagcacgtccggataaggcaggaaggcgttcgctacaattcgcagctcgccgccgctattaagatgacgcaccgcaccgcgaatcagcgtttgcgccgcatccaggctggtttgcatcccatcgtggaacggcgggttggagatgatcatatcaaaacgacctttcacctcggaaaagacgttgctggcaaagacttcaccttcaacaccgttggccgcaagtgttgcgcggctggcttctaccgccggggcagagacatcgcacaaggtgagacgaattttcgggctatggcgcgcaaaggcaacactaagcacgcccgcgccacagccgacatccagcactttacctttcgtgtgcggagttaacgtgctgagcagcaactggctaccgacatccagaccgtcgcggctaaacacgccaggcagcgttttgaccgtcaggccatcgacgctgtattcgccccagaatttctccgcatcaaataccggctgtttttccagacgaccaaaatagaggccacagcgacgagcgctgtcgactttattcaacggcgcataatctgccagcatctgctcggcgctgcgcacgccgctgcggttctcgccaacgacaaaaatatctgtccccactggcagcagagaaagtaaattcatcaactggaactgggcttccggtttgttcttcggccagtagtaaatcagcgtatcgcaatctgcgacgtcatccgccgtggcgaccagactgaaacgggcgttatcccccatctggcggcttaatacctgccagtggtggaattgctgggtatgagcacggctggccgcggtatctaaacgcgcgggcaggtcatcctgtaagtctccggcaaacagaatacggctttgttcgaaatcatcactgtgacgcagcaagacttcacttgccggggtaaatgcagacatggaatgctcctcaattgatactggcggcgattatagccatatgttggcgcggtatcgacgaatttgctatatttgcgcccctgacaacaggagcgattcgctatgacatcccgacgagactggcagttacagcaactgggcattacccagtggagcctgcgtcgccctggcgcgttgcagggggagattgccattgcgatcccggcacacgtccgtctggtgatggtggcaaacgatcttcccgccctgactgatcctttagtgagcgatgttctgcgcgcattaaccgtcagccccgaccaggtgctgcaactgacgccagaaaaaatcgcgatgctgccgcaaggcagtcactgcaacagttggcggttgggtactgacgaaccgctaagtctggaaggcgctcaggtggcaagtccggcgctcaccgatttacgggcaaacccaacggcacgcgccgcgttatggcaacaaatttgcacatatgaacacgatttcttccctcgaaacgactgatttaccggcggcttaccacattgaacaacgcgcccacgcctttccgtggagtgaaaaaacgtttgccagcaaccagggcgagcgttatctcaactttcagttaacgcaaaacggcaaaatggcggcgtttgcgattacgcaagtggtgctggatgaagctacattgttcaatattgcggtcgatcctgactatcagcgtcagggattgggaagggcgctgctggaacatctgatcgacgaactggaaaaacgcggcgtggcgacactatggctggaagtccgtgctagtaacgctgccgccattgccctgtacgaaagtttaggctttaacgaggcgacgattcgccgcaattactaccccaccacggacggtcgcgaagacgccatcatcatggcgttgccaatcagtatgtaatacaaggtggaataatgaagtgggactggattttctttgatgccgatgaaacgctgtttacctttgacagtttcaccggcctgcagcggatgtttcttgattacagcgtcacctttaccgctgaagattttcaggactatcaggccgttaacaagccactgtgggtggattatcaaaacggcgcgatcactagtttacagcttcagcacgggcggtttgagagctgggccgaacggctgaacgtcgagccaggtaaactcaacgaagcctttattaatgcgatggcggaaatctgcacgccgctgccgggcgcggtttctctgcttaacgccattcgtggcaacgccaaaatcggcatcatcaccaacggctttagtgccttgcaacaggtgcgtctggaacgcacgggcctgcgtgattacttcgatttgctggtgatttccgaagaagttggcgttgccaaaccgaataagaaaattttcgattatgcgctggaacaggcgggcaatcctgaccgtagtcgcgtgctgatggttggcgacactgccgagtccgatattctcggtggcatcaacgccgggcttgcgacctgctggctgaatgcacaccatcgcgagcaaccagaaggcatcgcgcccacctggaccgtttctagcttgcacgaactggagcagctcctgtgtaaacactgattgcctcccccccgttgatgggtaaaatagccgcaatttttcgttttcaacaagcgcggcgcgatgccgcttactcaagaagaaagaattatgacgttgtctccttatttgcaagaggtggcgaagcgccgcacttttgccattatttctcacccggacgccggtaagactaccatcaccgagaaggtgctgctgttcggacaggccattcagaccgccggtacagtaaaaggccgtggttccaaccagcacgctaagagcgactggatggagatggaaaagcagcgtgggatctccattactacgtctgtgatgcagtttccgtatcacgattgcctggttaacctgctcgacaccccggggcacgaagacttcagcgaagatacctatcgtaccctgacggcggtggactgctgcctgatggttatcgacgccgcaaaaggtgttgaagatcgtacccgtaagctgatggaagttacccgtctgcgcgacacgccgatcctcacctttatgaacaaacttgaccgtgatatccgcgacccgatggagctgctcgatgaagttgagaacgagctgaaaatcggctgtgcgccgatcacctggccgattggctgcggcaagctgtttaaaggcgtttaccacctttataaagacgaaacctatctctatcagagcggtaaaggccacaccattcaggaagtccgcattgttaaagggctgaataacccggatctcgatgctgcggttggtgaagatctggcacagcagctgcgtgacgaactggaactggtgaaaggcgcgtctaacgagttcgacaaagagctgttccttgcgggcgaaatcactccggtattcttcggtactgcgctgggtaacttcggcgtcgatcatatgttggatggcctggtggagtgggcacctgcgccgatgccgcgtcagactgatacccgtaccgtagaagcgagcgaagataaatttaccggcttcgtatttaaaattcaggccaacatggacccgaaacaccgcgaccgcgtggcgtttatgcgtgtggtgtccggtaaatatgaaaaaggcatgaaactgcgccaggtgcgcactgcgaaagatgtggtgatctccgacgcgctgacctttatggcgggtgaccgtagccacgttgaagaagcgtatccgggcgatatcctcggcctgcacaaccacggcaccattcagatcggcgacacctttacccagggtgagatgatgaagttcaccggtattccgaacttcgcaccagaactgttccgtcgtatccgcctgaaagatccgctgaagcaaaaacagctgctcaaagggctggtacagctttccgaagagggcgcggtgcaggtgttccgtccaatctccaacaacgatctgatcgttggtgcagttggtgtgctgcagtttgatgtggtggtagcgcgcctgaagagcgaatacaacgttgaagcagtgtatgagagtgtcaacgttgccactgcccgctgggtagaatgtgcagacgcgaagaaattcgaagagttcaagcgtaagaacgaaagccaactggcgcttgatggcggcgataacctcgcttacatcgctaccagcatggtcaacctgcgcctggcacaggaacgttatccggacgttcagttccaccagacccgcgagcattaattcttgcctccagggcgcggtagccgctgcgccctgtcaatttcccttccttattagccgcttacggaatgttcttaaaacattcacttttgcttatgttttcgctgatatcccgagcggtttcaaaattgtgatctatatttaacaaagtgatgacatttctgacggcgttaaataccgttcaatgcgtagatatcagtatctaaagccgtcgattgtcattctaccgatattaataactgattcagaggctgtaatggtcgttattcatcactcatcgcttttgtgatggcgaccattgacttctgtagagggtgaagtctctccctattcagcaatgcaacctcgtgttgccaggctcaaattacgagcaaacatacaggaataaatcgatgactatgacaagactgaagattagcaaaactctgctggctgtaatgttgacctctgccgtcgcgaccggctctgcctacgcggaaaacaacgcgcagactaccaatgaaagcgcagggcaaaaagtcgatagctctatgaataaagtcggtaatttcatggatgacagcgccatcaccgcgaaagtgaaggcggccctggtggatcatgacaacatcaagagcaccgatatctctgtaaaaaccgatcaaaaagtcgtgaccctgagcggtttcgttgaaagccaggcccaggccgaagaggcagtgaaagtggcgaaaggcgttgaaggggtgacctctgtcagcgacaaactgcacgttcgcgacgctaaagaaggcagcgtgaagggctacgcgggtgacaccgccaccaccagtgaaatcaaagccaaactgctggcggacgatatcgtcccttcccgtcatgtgaaagttgaaaccaccgacggcgtggttcagctctccggtaccgtcgattctcaggcacaaagtgaccgtgctgaaagtatcgccaaagcggtagatggtgtgaaaagcgttaaaaatgatctgaaaactaagtaattcgtcgtaattcgtcctcccgaactttgtcgggaggcgcgatgtgcaccacactaaaaatatcgcattgagtgattttcacgctcatatcaagcggtgacattaactatggtaaaggagacgcttatgtttcgttggggcatcatatttctggttatcgcgttaatcgccgccgcacttgggtttggtggtctggccggtaccgctgcaggcgcagctaaaattgtctttgtcgtcgggattattctgttcctggtgagtttgttcatgggccgaaaacgaccctaaatttcagaccattaagaaaattttatccaaagccagtccagcggactggcttttgcggttttagcgaataataaattgcgttactttgtcattctttcacaacaaaaacaggaaggcagaggtggggcagcgaatacctgtaacgcttggtaatattgcgccgttgagcctaaggccgttccagcctggacgaatagctctggtgtgcgaaggcggcggacagcgtggaattttcacggctggcgtgctggatgagtttatgcgcgcgcagtttaatcctttcgatctttatctcggcacatctgccggggcgcagaacctcagcgcgtttatctgcaatcagcccggttacgcgcgcaaagtcatcatgcgctataccacaaaacgcgaatttttcgatccattgcgctttgtccgtggaggaaatcttatcgatctcgactggctggtggaggccactgcaagccagatgccgttgcaaatggataccgccgcgcggttgtttgacagcggcaaaagcttttatatgtgcgcctgtcgtcaggatgactacgcgccgaattactttttaccaaccaaacaaaactggctggatgtgattcgcgcctccagtgcgatacctggcttttatcgtagcggagtgagcctggaaggcattaactacctggatggcgggatcagtgatgcgattccggttaaagaggcggcaaggcagggcgctaaaacgttggtcgtcattcgcactgtgccgagtcaaatgtactacacgccgcagtggttcaaacgcatggaacgctggctgggtgacagtagcctgcagccgctggtcaatctggtgcagcatcatgaaaccagctatcgtgacattcagcaatttattgagaaaccaccgggcaagctgcggatattcgaaatttatccgccgaagccattacatagtatcgcgcttggcagtcggattccggcgctgcgtgaagactataaacttgggcgtttatgcggtcgttatttcctcgccacggttggcaagctattaactgaaaaagcgccgcttacccgccatctggtgccagtggtgacgccggaaagcattgtcattccgcctgcgccagtcgccaacgatacgctggttgccgaagtgagcgacgctccgcaggcgaacgacccgacatttaacaatgaggatctggcttgatttgccgttttatcgacacccactgccattttgatttcccgccgtttagtggcgatgaagaggccagcctgcaacgcgcggcacaagcgggcgtaggcaagatcattgttccggcaacagaggcggaaaattttgcccgtgtgttggcattagcggaaaattatcaaccgctgtatgccgcattgggcttgcatcctggtatgttggaaaaacatagcgatgtgtctcttgagcagctacagcaggcgctggaaaggcgtccggcgaaggtggtggcggtgggggagatcggtctggatctctttggcgacgatccgcaatttgagaggcagcagtggttactcgacgaacaactgaaactggcgaaacgctacgatctgccggtgatcctgcatagtcggcgcacgcacgacaaactggcgatgcatcttaaacgccacgatttaccgcgcactggcgtggttcacggtttttccggcagcctgcaacaggccgaacggtttgtacagctgggctacaaaattggcgtaggcggtactatcacctatccacgcgccagtaaaacccgcgatgtcatcgcaaaattaccgctggcaagcttattgctggaaaccgacgcgccggatatgccgctcaacggttttcaggggcagcctaaccgcccggagcaggctgcccgtgtgttcgccgtgctttgcgagttgcgccgggaaccggcggatgagattgcgcaagcgttgcttaataacacgtatacgttgtttaacgtgccgtaagccggataaggcgttcacgccgcatccggcagttggcgcacaatgcctgatgcgacgcttaacgcgtcttatcatgcctacaggtttgtgccgaaccgtaggccggataaggcgttcacgccgcatccggcagttggcgcacaatgcctgatgcgacgcttgtcgcgtcttatcatgcctacaagtctgtgccgaaccgtaggccggataaggcgttcacgccgcatccggcagtcggcgcataatgcctgatgcgacgcttgtcgcgtcttatcatgcctacaggtttgtgccgaaccgtaggccggataaggcgttcgcgccgcatccggcagttggcgcacaatgcctgatgcgacgcttgacgcgtcttatcaggcctacaagtctgtgccgaaccgtaggccgtatccggcatgtcacaaatagagcgccggaaatatcaaccggctcaccccgcgcacctttaacgcatcagccaacggctcaacgtcttccggcgtggcgctcgcccagctttgcgcctcgccatacacgccgtgggcatgaaacgcgttcaggcgtaccggaacatcgccgagtcccttgataaacgccgccagttcttcgatgtgttgcaaataatccacctggccagggatcaccagcaaacgcagttccgccagcttgccgcgctctgccagcaaatagatgctgcgcttaatctgctgattatcgcgtccggtgagttgttgatgacattcgctcccccacgctttgagatcgagcattgcgccgtcgcacaccgggagcaatttttcccagccggtttcgctcaacatgccgttactgtccaccagacaggtgagatggcgcagttgcggatcgtttttgatagcagtaaacagcgccaccacaaacggcagctgggtcgtggcttcaccgccactcaccgttatcccttcgataaacagcactgctttgcggacatggctaagcacttcgtccacgctcatggattgcgccatgggcgtggcatgttgcggacacctcttcaggcaggtatcacactgctcgcaaaccacagcgttccacaccactttgccgtcaacaatctgcaacgcctgatgcggacactgtggcacgcactccccacagtcattgcaacgtcccatcgtccacggattgtgacagtttttgcagcgcagattgcagccctgcaaaaacagagccagacgactgcctggcccgtcaacgcaggagaaggggataatcttactgactaaagcgcatctgctgttcatggcttatcacgcgcggctggcgttccagaatacgagtgttgcgtgcggcttcttcgcccagccaggtggtgttggtgcgactaccttcggcgcgatatttttctaaatcgctcaaacgcaccatataaccggtaacgcgaaccagatcgttaccgctgacattggcggtaaattcacgcattccggctttaaaggcaccgaggcaaagctgtaccagtgcctgcgggttacgtttgatggtttcgtcgagcgtcagaatgtcgctgatgccggaataataataagcatgatgcggggcgacagtttgcagatgggtgatcggatctggctcatcgccatacggcaaacgcgcgcccggcgtggtgccgatatcggaactgatcccgctctgtgcgtgtaacatggcgcgtttttgccagccatatttcacgggggtattggcgacaaactccgccagttgcgcgctgatgcgataacctacttcatttgcggcggcttctttaccgtagcgcgcggcaatcccttctttttcacacagcaagttaaccgcttccgccagcccatacatgccaaacattggcacaaaacgttcagggttaatcagcccttctttcaccaggaagctattctcaaagaagtgactttgttgatagaggaattcacaccgcgcatcgatgatggcgatctgctgctggcagtagtgcggtagagtgcgcgtaaagaagtcatccaggctttcgctgcgctcggcaatggctttcaggttaaggcgtaccagcgtgctgccaccacccgccagcggcagactgttgtaacagctcacaatcccgtagcccccttttgtgaaaattttatcatgcaccggaccgttggcgatgtgcggtttgctacattcacagatgttcttcgccacttccagcagcaggtcatcaggggtgatttcaggatcgtagataaaggtcaggttcggactaacctgcttcaactctgcatctgcacgtaagatcgcgcgggtaatggggctatcagacgggccgatattggcgtgcataaaggcgtctggcagggttctgtcgaggtaacgccagaaacgttttattcgaacatcgatctcgtcttgtgttagaattctaacatacggttgcaacaacgcatccagttgccccaggtagaccggcatgcttgtgacgctcggtacgtggtggtaaagaatggtcagcagagagagtgcgtcatcaagatctttcgcgccttccagctccagccattcggaaccgttcgccagaaaacgggcgtaatcgggtaagacatagcgcggtttgtacggcgcatgaccttcaaacatatcgcagattacaccttcatccagcgcgcggcgggcttcggcaggaagctgtgggtaaggcagattgttttctgcttccagtgccagaaaatggcgcttctgctccgggctaagcactgggctggtgacaatttgctggcaacgttgttgcagtgcattttcatgagaagtgggcatcttcttttccttttatgccgaaggtgatgcgccattgtaagaagtttcgtgatgttcactttgatcctgatgcgtttgccaccactgacgcattcatttgaaagtgaattatttgaaccagatcgcattacagtgatgcaaacttgtaagtagatttccttaattgtgatgtgtatcgaagtgtgttgcggagtagatgttagaatactaacaaactcgcaaggtgaattttattggcgacaagccaggagaatgaaatgactgatctgaaagcaagcagcctgcgtgcactgaaattgatggacctgaccaccctgaatgacgacgacaccgacgagaaagtgatcgccctgtgtcatcaggccaaaactccggtcggcaataccgccgctatctgtatctatcctcgctttatcccgattgctcgcaaaactctgaaagagcagggcaccccggaaatccgtatcgctacggtaaccaacttcccacacggtaacgacgacatcgacatcgcgctggcagaaacccgtgcggcaatcgcctacggtgctgatgaagttgacgttgtgttcccgtaccgcgcgctgatggcgggtaacgagcaggttggttttgacctggtgaaagcctgtaaagaggcttgcgcggcagcgaatgtactgctgaaagtgatcatcgaaaccggcgaactgaaagacgaagcgctgatccgtaaagcgtctgaaatctccatcaaagcgggtgcggacttcatcaaaacctctaccggtaaagtggctgtgaacgcgacgccggaaagcgcgcgcatcatgatggaagtgatccgtgatatgggcgtagaaaaaaccgttggtttcaaaccggcgggcggcgtgcgtactgcggaagatgcgcagaaatatctcgccattgcagatgaactgttcggtgctgactgggcagatgcgcgtcactaccgctttggcgcttccagcctgctggcaagcctgctgaaagcgctgggtcacggcgacggtaagagcgccagcagctactaagtaagatgctttacgcctgatgcgctgcgcttatcaggcctacgagacgtatctacccgtaggccggataaggcgtagacgcatccggcaaaagccgcctcatactcttttcctcgggaggttaccttgtttctcgcacaagaaattattcgtaaaaaacgtgatggtcatgcgctgagcgatgaagaaattcgtttctttatcaacggtattcgcgacaacactatctccgaagggcagattgccgccctcgcgatgaccattttcttccacgatatgacaatgcctgagcgtgtcagcctgaccatggcgatgcgagatagtggaaccgttctcgactggaaaagcctgcatctgaatggcccgattgttgataaacactccaccggtggcgtcggcgatgtgactagcctgatgttggggccgatggtcgcagcctgcggcggctatattccgatgatctctggtcgcggcctcggtcatactggcggtacgctcgacaaactggaatccatccctggcttcgacattttcccggatgacaaccgtttccgcgaaattattaaagacgtcggcgtggcgattatcggtcagaccagtagtctggctccggctgataaacgtttctacgcgacccgtgatattaccgcaaccgtggactccatcccgctgatcaccgcctctattctggcgaagaaacttgcggaaggtctggacgcgctggtgatggacgtgaaagtgggtagcggcgcgtttatgccgacctacgaactctctgaagcccttgccgaagcgattgttggcgtggctaacggcgctggcgtgcgcaccaccgcgctgctcaccgacatgaatcaggtactggcctccagtgcaggtaacgcggttgaagttcgtgaagcggtgcagttcctgacgggtgaatatcgtaacccgcgtctgtttgatgtcacgatggcgctgtgcgtggagatgctgatctccggcaaactggcgaaagatgacgccgaagcgcgcgcgaaattgcaggcggtgctggacaacggtaaagcggcagaagtctttggtcgtatggtagcggcacaaaaaggcccgaccgacttcgttgagaactacgcgaagtatctgccgacagcgatgctgacgaaagcagtctatgctgataccgaaggttttgtcagtgaaatggatacccgcgcgctggggatggcagtggttgcaatgggcggcggacgccgtcaggcatctgacaccatcgattacagcgtcggctttactgatatggcgcgtctgggcgaccaggtagacggtcagcgtccgctggcggttatccacgcgaaagacgaaaacaactggcaggaagcggcgaaagcggtgaaagcggcaattaaacttgccgataaagcaccggaaagcacaccaactgtctatcgccgtatcagcgaataacggtatactgatctgatcatttaaatttgaagcactgagtacggagaacatatgaaacgtgcatttattatggtgctggacagtttcggcatcggcgctacagaagatgcagaacgctttggtgacgtcggggctgacaccctgggtcatatcgcagaagcttgtgccaaaggcgaagctgataacggtcgtaaaggcccgctcaatctgccaaatctgacccgtctggggctggcgaaagcacacgaaggttctaccggtttcattccggcgggaatggacggcaacgctgaagttatcggcgcgtacgcatgggcgcacgaaatgagttccggtaaagataccccgtctggtcactgggaaattgccggtgtcccggttctgtttgagtggggatatttctccgatcacgaaaacagcttcccgcaagagctgctggataaactggtcgaacgcgctaatctgccgggttacctcggtaactgccactcttccggtacggtcattctggatcaactgggcgaagagcacatgaaaaccggcaagccgattttctatacctccgctgactccgtgttccagattgcctgccatgaagaaactttcggtctggataaactctacgaactgtgcgaaatcgcccgtgaagagctgaccaacggcggctacaatatcggtcgtgttatcgctcgtccgtttatcggcgacaaagccggtaacttccagcgtaccggtaaccgtcacgacctggctgttgagccgccagcaccgaccgtgctgcagaaactggttgatgaaaaacacggccaggtggtttctgtcggtaaaattgcggacatctacgccaactgcggtatcaccaaaaaagtgaaagcgactggcctggacgcgctgtttgacgccaccatcaaagagatgaaagaagcgggtgataacaccatcgtcttcaccaacttcgttgacttcgactcttcctggggccaccgtcgcgacgtcgccggttatgccgcgggtctggaactgttcgaccgccgtctgccggagctgatgtctctgctgcgcgatgacgacatcctgatcctcaccgctgaccacggttgcgatccgacctggaccggtactgaccacacgcgtgaacacattccggtactggtatatggcccgaaagtaaaaccgggcagtctgggtcatcgtgaaaccttcgcggatatcggccagactctggcaaaatattttggtacttctgatatggaatatggcaaagccatgttctgatggatttgggcggagcgttgactccgcctttgttatgtcacaaaaaggataaaacaatggctaccccacacattaatgcagaaatgggcgatttcgctgacgtagttttgatgccaggcgacccgctgcgtgcgaagtatattgctgaaactttccttgaagatgcccgtgaagtgaacaacgttcgcggtatgctgggcttcaccggtacttacaaaggccgcaaaatttccgtaatgggtcacggtatgggtatcccgtcctgctccatctacaccaaagaactgatcaccgatttcggcgtgaagaaaattatccgcgtgggttcctgtggcgcagttctgccgcacgtaaaactgcgcgacgtcgttatcggtatgggtgcctgcaccgattccaaagttaaccgcatccgttttaaagaccatgactttgccgctatcgctgacttcgacatggtgcgtaacgcagtagatgcagctaaagcactgggtattgatgctcgcgtgggtaacctgttctccgctgacctgttctactctccggacggcgaaatgttcgacgtgatggaaaaatacggcattctcggcgtggaaatggaagcggctggtatctacggcgtcgctgcagaatttggcgcgaaagccctgaccatctgcaccgtatctgaccacatccgcactcacgagcagaccactgccgctgagcgtcagactaccttcaacgacatgatcaaaatcgcactggaatccgttctgctgggcgataaagagtaattgtgtttcgctgcaaggcgattgccttgtgaagccggagcgggagactgctccggctttttagtatctattcatttttctctccagcttgaatattttcgctatacttttcagtgaaatgtgttaataaatctattcaagtatctattcacgaatctattcattaatgagcgagctgactgatcttttactgcaagggccgcgttctgccccggaattgcgccagcgtctggcaatcagtcaggcgacgttcagtcgccttgttgccagagaagatcgggtgattcgctttggtaaagcacgggcaacgcgatatgcactgctgcgtccttatcgcggaattgagcgtattcccgtctggcgggtggacgataccggaaaggcgcataaattcgccgacatccggttgtgctggccgcagggaagttgtctggtaacaggcgcagatggcgacgaacagtggtttgatggtttgccctggtatttgaccgatctccgaccgcagggctttttagggcgcgcgtggggcaggaagttagccgcgcaactgaatctgactgatgatatacgtctctggcaggaagaagatgtgctctacgccctgaccgtatttaacggtgaatatactggcggttggttggtcggggaggggaattatcagcgatggattactgcacaacaccctgcggaaattcctctggatcaaaaactcacccattacgaacagctggcaagtgatgcactggcaggagaaattgtgggttcttctgcgggcggcgagcagccaaaatttacctactatgcacaaacgccgagtggcaataaacatgtgttggtgaaattcaccgtaccacagcaaaccgcggtcagccaacgttggggtgacctgctaattgctgaatctattgccgcgcaaatcctgcgtgacggtgggatccacgccatcgagagtacggtgcttgtaacaagtaacaggcaggtattcctcgaagcggaacgctttgactgcaaaggtaacgatggtcgcttgcctattgtgagcctggaggcggtgcagagtgagtttatctcttctccgggaagctggccgcaggcaatgcgccgtttgtgtgagcaacaacttgtcactcaccagagcgtggcgcaaacagaagtgatctgggcatttgggcgacttatcgccaacagcgatatgcacgcaggtaatttaagcttttatttatctgaaccgccatttgcgctgacgcccgtctacgacatgctgccgatggtctatgcaccaaacagcgctggaatgctgcgtgatgctgccattgaggtgaagtttgatcttaacgtcagtaaaagcgcttggttaacggcgatcccgctggcgcagcagttctggcaaacggtcgccagagatccgcgtatcagcgaggcgtttcgccacattgcgcaagaaatgccggaaaaaatccggcaaatcgaagagaaagttgcccgcatgggcgggtaattaccttacagcccccgccatccatgcgcttaactcccgtagctctttttcctgttccgggaagtcaaccaacagcgcttcgcactcctgttgcagcatatctgcgcggtacaggcagccttgcagtcgtccggcgagggcttccagcggcgcggggttgaggctgtcggtaaacacctgggcgcgggtgatatggcctttttcaacgtcgaaatgcagttccacgccgccccaggtaaagcgttcatccagcagatggctgaatgccggagcctgaccgaagttccattcccagctactctggcgggcaaaggtttcggcgaagtttggcaagtctggcgttttgttcggggagatgatttccgcttccacgcgctcgccataatgggcgaaaaaggcctcggttatggcctcgcaaacctgctcatgggtgatccccggcaacagctcggtgaggttggtcacgcgggaacgtacgctcgtaatgcctttcgccgccagtttctttttatccggattgagatagtttgccaggcggctgaggtcggcattgagtagcaaggtgccgtggtggaagccgcgatctttggtttcgcgataggcgctgccactgactttgcggtcgccttcgacggttttcaccaccagatcgttacgtccggacgcttcggcgctgacgccgagcgcgttcagcgcattgagcacaatgctcgtggagatagttttatcgtactccggcttgccagccataaaggtaaagcaggtattgccgagatcgtggaacaccgcgccgccaccgctactgcgccgcgccaggcggacgttatcttcttccatccgccgggtattacactctttccacgggttctgcgcgcgaccaattactaccgtgtcggcattgcgccagagaaacagaacgcgctgcgtggcgggcatttggcgaaaaatacactcttccaccgccaggttaaaccacgggtcgtaagagtcagagatgagcaggcgtaatgtggacataacgatttcctttcttgtagtaatgggtcactcttttttctcgctttcttcctcttccggcaccggtttgctggcggctaacaggaaggggctttgctgccagcgggtgcgtttaccctgtagcagcgtgcgggtcagcactacaccgattgccagactgagcagcaacatcaggcgtaaaatgttagtggtgttatccacctgttgggcttcggtggcgagcgtatgggtgtcgagtgtcaggcgcagatagccgagcggtccgtttttacccgcaattggctcgacaatctgctggttaaaatagccgcctgcttttttaccgtcgagcgccagccggtcgcgcacttcgacgctttcgccagaacgtgcgataagatcgccttgttcgtcatacacacccgcgtcgaggatacggctttcatccgttaactgatcgaggatcgcctgaatgcgtttttcatccggactgtcggtacgcatcagcggtgcaacgttcagcgtcacctgacgcgccagggtgcgggccagttcttccagctgtggattacgctgtcgctggtggttttgactaaaccaactcgctccctgcatcagcgccactaacaaggcaagacagaacaggacaatcactgcccgatgcagccggaatttcagttttgtgcgagccatcttccaccctttgaaaatttgagacttaatgttgccagaagcaatggatacaaggtagcctcatgcgttattttccctgcttcgaacgattttacaggagccttaatgcctaacattacctggtgcgacctgcctgaagatgtctctttatggccgggtctgcctcttagtttaagtggtgatgaagtgatgccactggattaccacgcaggtcgtagcggctggctgctgtatggtcgtgggctggataaacaacgtctgacccaataccagagcaaactgggtgcggcgatggtgattgttgccgcctggtgcgtggaagattatcaggtgattcgtctggcaggtagtctcaccgcacgggctacacgcctggcccacgaagcgcagctggatgtcgccccgctggggaaaatcccgcacctgcgcacgccgggtttgctggtgatggatatggactccaccgccatccagattgaatgtattgatgaaattgccaaactggccggaacgggcgagatggtggcggaagtaaccgaacgggcgatgcgcggcgaactcgattttaccgccagcctgcgcagccgtgtggcgacgctgaaaggcgctgacgccaatattctgcaacaggtgcgtgaaaatctgccgctgatgccaggcttaacgcaactggtgctcaagctggaaacgctgggctggaaagtggcgattgcctccggcggctttactttctttgctgaatacctgcgcgacaagctgcgcctgaccgccgtggtagccaatgaactggagatcatggacggtaaatttaccggcaatgtgatcggcgacatcgtagacgcgcagtacaaagcgaaaactctgactcgcctcgcgcaggagtatgaaatcccgctggcgcagaccgtggcgattggcgatggagccaatgacctgccgatgatcaaagcggcagggctggggattgcctaccatgccaagccaaaagtgaatgaaaaggcggaagtcaccatccgtcacgctgacctgatgggggtattctgcatcctcagtggcagcctgaatcagaagtaattgctcgcccgccatcctgcgggcggcacagcattaacgaggtacaccgtggcaaaagctccaaaacgcgcctttgtttgtaatgaatgcggggccgattatccgcgctggcaggggcagtgcagtgcctgtcatgcctggaacaccatcaccgaggtgcgtcttgctgcgagcccaatggtggcgcgtaacgagcgtctcagcggctatgccggtagcgccggggtggcaaaagtccagaaactctccgatatcagccttgaagagctgccgcgtttttccaccggatttaaagagttcgaccgcgtactaggcggcggcgtggtgccaggaagtgccattctgattggcggtaaccctggtgcggggaaatccacgctgctactgcaaacgctgtgcaaactggcccagcagatgaaaacgctgtatgtcaccggcgaagagagcctgcaacaggtggcaatgcgcgctcatcgccttggcctgccgactgacaatctcaatatgttgagcgaaaccagcatcgaacagatctgcctgattgccgaagaagagcaaccgaagctgatggtaattgacagcatccaggtgatgcatatggcggatgtacagagtagccctggtagcgtggcgcaggtgcgtgaaacggcggcttatttgacacgcttcgccaaaacgcgcggtgtggcgattgtcatggtggggcacgtaaccaaagatggtagcctggctggcccgaaagtgctggaacactgtatcgactgtagcgtgcttttggatggcgatgccgactcccgttttcgcaccttgcgcagccataaaaaccgcttcggcgcggtgaatgagctgggcgtcttcgcgatgaccgaacaggggctgcgtgaagtcagcaaccctagcgcaattttcttaagtcgcggcgatgaagtgacctccggtagcagtgtgatggtggtatgggaaggaacgcgtccactgctggtggagattcaggcgctggtcgatcacagcatgatggcgaacccacgccgcgtggcagtggggctggaacaaaaccgtctggcaatcctgctggctgtgttgcaccgtcacggtggtctgcaaatggccgatcaggatgtgtttgtgaacgtggtcggcggcgtgaaggtaaccgaaaccagtgccgacttagcgttactgctggcgatggtttccagcctgcgcgacagaccgctgccgcaggatctggtggtgtttggtgaagtcgggctggcaggggagatccgcccggtgcccagcggtcaggaacgaatctctgaagcggcgaaacacggttttcgccgggcgattgttccggcggctaacgtgccgaaaaaagcgccggaagggatgcagatttttggcgttaaaaaactctccgacgcgcttagcgtgttcgacgacttataatgagatatacggagggagatatgagcagttttgattacctgaaaactgccatcaagcaacagggctgcacgctacagcaggtagctgatgccagcggtatgaccaaagggtatttaagccagttactgaatgccaaaatcaaaagccccagcgcgcaaaagctggaggcgttgcaccgttttttggggcttgagtttccccggcagaagaaaacgatcggtgtcgtattcggtaagttctacccactgcataccggacatatctaccttatccagcgcgcctgtagccaggttgacgagctgcatatcattatgggttttgacgatacccgtgaccgcgcgttgttcgaagacagtgccatgagccagcagccgaccgtgccggatcgtctgcgttggttattgcaaacttttaaatatcagaaaaatattcgcattcatgctttcaacgaagagggcatggagccgtatccgcacggctgggatgtgtggagcaacggcatcaaaaagtttatggctgaaaaagggatccagccggatctgatctacaccagcgaagaagccgatgcgccacagtatatggaacatctggggatcgagacggtgctggtcgatccgaaacgtacctttatgagtatcagcggtgcgcagatccgcgaaaacccgttccgctactgggaatatattcctaccgaagtgaagccgttttttgtgcgtaccgtggcgatccttggcggcgagagcagcggtaaatccaccctggtaaacaaacttgccaatatcttcaacaccaccagtgcgtgggaatatggccgcgattatgtctttagtcacctcggcggtgatgagatcgcattgcagtattctgactacgataaaatcgcgctgggccacgctcaatacattgattttgcggtgaaatatgccaataaagtggcatttatcgataccgattttgtcaccactcaggcgttctgcaaaaagtacgaagggcgggaacatccgttcgtgcaggcgctgattgatgaataccgtttcgatctggtgatcctgctggagaacaacacgccgtgggtggcggatggtttacgcagcctcggcagtagcgtggatcgcaaagagttccagaacttgctggtggagatgctcgaagagaacaatatcgaatttgtgcgggttgaagaggaagattacgacagtcgtttcctgcgctgcgtggaactggtgcgggagatgatgggggagcagagataaccgtgatgaaactgctcaaaggcgaggtataaaatgagtttttttgatgagttgaaaacctctctggaagaggctgtcgagattaaacaaggtttgaaaaaacctgcacgggtgacccgccacgaaattgaggatgctaaggctgttgtagaccggaaacggtgttcacgccgcatccggcattcggtgctcaatgcctgatgcgacgcttaccgcgtcttatcaggcctacagttttacaacgtattgaaattgctggttttgtaggccggataaggcgttcgcgccgcatccggcattttacgcattacttcgcaatacgcttgtacttgatacgcttcggctccagcgcgtctgcgcccagcgtgcgtttcttgtactcttcgtactcggtaaagttaccttcgaagaactcaactttaccttcatcctggtaatccagaatgtgcgtggcgatacggtcgaggaaccaacggtcgtggctgataaccatcgcacagcccgggaactccagcagggcgttttccagcgcgcgcagggtttcgatatccaggtcgttggttggttcgtcgagcagcagcatgttgccgccaacctgcagcagcttcgccagatgcagacgaccgcgctcaccaccggagagttcaccaacgcgtttaccctgatcaacccctttaaagttaaagcggccaacgtaggcgcggcttggcatctcggtgttgccgatcttcatgatatccagcccgccggaaacttcttcccaaacggttttgctgttatccatactgtcacggaactgatcaacgctcgccagtttcaccgtttcacccaaagtgatggtgccgctgtccggctgttcctgaccagagatcatacggaacagggtgcttttacccgcaccgttcggaccgatgatcccgacgatcgctcctttcgggatgctgaagctcaggtcatcaatcagcagacgatcgccataggatttacgcaggttgctgacttccagcactttatcgcccagacgcggtccaggtggaataaacagttcgttggtttcgttacgtttctgatattcggtgctgttcagttcttcaaagcgcgccagacgtgctttacctttgctctgacggcctttagtaccttgacgtacccattccagctctttctcaatgctcttacgacgcgccgcttcttgactagcttcctgcgccaggcgctgatctttctgctccagccaggaggagtagttaccttcccacggaataccttcaccgcggtcaagttcgaggatccagcctgcaacgttatcgaggaagtaacggtcgtgggtaatcgccacaacggtgccttcgaagtcgtgcaggaagcgttccagccaggccacggattcggcatccaggtggttggtcggttcgtcgagcagcagcatgtctggtttttccagcagcaggcggcacaacgctacgcgacgacgttcaccaccggagaggttagcgattttcgcgtcccagtccggcagacgtagcgcatccgccgcacgctccagctgtacgttcagattatgaccgtcgtgagcctgaatgatctcttccagacggccttgttcagcggccagcttgtcaaaatcggcatccggatcggcgtacagcgcatacacttcatccaggcgtttcagggcgttaaccacttcactaaccgcttcttcaatggactcacgcacggtgtgttccgggttcagctgcggttcctgcggcagataaccaatcttgatgtctggctgcggacgcgcttcaccttcgatgtctttatcaatgcccgccataatgcgcagcagggtggacttacccgcgccattcagacccaggacaccaatttttgccccagggaagaaactcagagagatgtttttcaaaatatgacgtttcggcggaacaactttgccgacacgatgcatggtataaacgaattgagccacgttggacttcgcctctatgtttatcgtgataatgagttttcaaaggcgaagtgtagcctttttccccgcctaatcccagccggtcgatcaccctcgcagtaaaagtaaaaaagtgtccgtaacgtggcgtaaacggcaatgactggttagcataaatctattacgcggcatgacgctgcattgatgtatttacacttagaggatgcgcttgtggaaaaagccaaacaagttacctggcggctgttggctgccggtgtctgtctgctgacggtcagcagcgtggcgcgagccgacagtctggatgagcagcgtagtcgttacgcgcaaatcaagcaggcctgggataatcgacaaatggatgtggtcgaacaaatgatgcctggactgaaggattatccgctttatccctacctggaataccgccagatcaccgatgatctgatgaatcaaccggcggtgacggtcactaactttgttcgcgctaaccccacgcttcctcccgctcgcacgctgcaatctcgtttcgtcaatgaactggcgcggcgtgaagactggcgtggcttgttagcctttagcccggaaaagcccggaactaccgaagcgcaatgtaattactactatgcgaaatggaacaccgggcagagtgaagaagcctggcaaggggcgaaagagctgtggctaaccggcaagagccagcctaacgcctgtgacaagttatttagcgtctggcgtgcgagtggtaaacaagatccgctggcgtatttagagcgtatccgtctggcgatgaaagcgggtaacacaggcctggtaacagtgctggcagggcagatgcctgccgattaccagactatcgccagcgcaatcattagtctggcgaacaaccctaatacggtactgaccttcgcgcgtacaactggcgcgaccgattttacccgtcaaatggcggcggtggcgtttgccagtgtggcgcggcaggatgctgagaatgcacggctgatgatcccaagccttgcccaggcgcagcagcttaatgaagatcagattcaggagctgcgcgatatcgtcgcctggcgtttgatgggcaacgatgtcaccgacgagcaggcgaaatggcgcgatgacgccattatgcgcagccaatctactagccttattgaacgccgtgtacgaatggcgcttggcaccggcgatcgtcgcggcctgaatacctggctggcgcgtctgcctatggaagcgaaagagaaagatgaatggcgttactggcaggcggatttattgctggaacgcggacgtgaagctgaagcaaaagagattttgcatcaactcatgcaacagcgtggtttctacccgatggttgcagcacaacgcatcggcgaagagtatgagctgaagattgataaagcgccgcagaatgttgacagcgccctgactcaggggccggagatggcgcgcgtgcgcgagttgatgtactggaatctcgataataccgcgcgtagcgagtgggccaatctggtgaagagcaagagtaaaacagagcaggctcaactggcgcggtatgctttcaacaaccaatggtgggatcttagcgttcaggcaacgatcgccgggaagctgtgggatcatctggaagagcgattcccgctggcttacaacgatcttttcaagcgctacaccagcggtaaggagatcccgcaaagctatgcgatggcgattgctcgtcaggagagcgcctggaatccgaaagtgaaaagtccggtaggggccagcggcttgatgcagattatgcctggtacagcgacccatacggtgaagatgttctctattcccggttatagcagtcctgggcaattgctggatccggaaacgaatatcaacattggcaccagttacctgcaatatgtttatcagcagtttggcaataatcgtattttctccagtgcagcttataacgccggaccagggcgggtgcgaacctggcttggcaacagcgccgggcgtatcgacgcagtggcatttgtcgagagtattccattctccgagacgcgcggttatgtgaagaacgtgctggcttatgacgcttactaccgctatttcatgggggataaaccgacgttgatgagcgccacggaatggggacgtcgttactgatccgcacgtttatgatatgctatcgtactctttagcgagtacaaccgggggaggcattttgcttcccccgctaacaatggcgacatattatggcccaacaaagtccctatagtgcagcgatggcagaacagcgtcaccaggagtggttacgttttgtcgacctgcttaagaatgcctaccaaaacgatctccatttaccgttgttaaacctgatgctgacgccagatgagcgcgaagcgttggggactcgcgtgcgtattgtcgaagagctgttgcgcggcgaaatgagccagcgtgagttaaaaaatgaactcggcgcaggcatcgcgacgattacgcgtggatctaacagcctgaaagccgcgcccgtcgagctgcgccagtggctggaagaggtgttgctgaaaagcgattgattttgtaggcctgataagacgtggcgcatcaggcatcgtgcaccgaatgccggatgcggcgtgaacgccttatccgtcctacaaatacccgtaatttcaatatgtttggtaggcatgataagacgcggcagcgtcgcatcaggcgcttaatacacggcattatgaaacggactcagcgccaggatcaccgcctggtgatagacgctggcgcgagtgagtttcccggcggtaaacacgccgatcgccccttccttacgaccaatctcatcaataccggtataacggctcatcacgggaccaagcgcctcaccttcacgcactttttccagaatcaccgcaggcaacggcaaagtagcgctacgcgcctcgccgcgctggctggcgttttcaatcaccacccaactgaaagtgctgtcaccatcgatgccagcttcaatcgccacccaaaaatcagcctctggaagtaaacggcgggcattggctacccgatttcgtgcgccagcgcgcgtttcctcactgccaaagggctgttccggtacaccgctctcgacggcaacggatgcaatatggcaggatccttcgccgaagatctcgtgaaatgcctgcagaatggcctgaattttagcgggattggtggtcgcacagacaacttggtgcataatcagcattactcagaaaattaacgttacagcagtatacggaaaaaagcatgttacaggtatacctagtccgccacggtgaaacgcagtggaacgccgagcgacgtattcagggccagtctgacagcccgctgaccgccaaaggtgagcaacaggcgatgcaggtggcaacccgtgccaaagagcttggcattacgcatatcatcagtagcgatttaggacgcacccggcgtacggcggaaatcatcgcccaggcctgcggctgtgacatcatctttgattctcgcctgcgtgaattaaacatgggtgtgctggaaaaaagacatatcgattctctgaccgaagaagaagagaactggcgtcggcagctggtcaatggcaccgttgacgggcgtattcctgaaggcgagagtatgcaggagctcagcgatcgcgtcaatgcggcactggaatcttgccgggacttaccgcagggaagccgaccgctgctggtgagtcatggtattgcactgggatgcctggtgagtacgattctcggattaccagcatgggcagagcgccgcttacgtctgcgtaactgttctattagccgcgtggattatcaggaaagcctgtggctggcgtctggctgggtcgttgaaaccgcaggggacatcagccatctggacgcccctgcattagatgagctgcagcgttaacgacggatcggaatcagcagttcacagcgtagattaattgggcgatctcccgctttggcatcttctgccgggtagtatcgctcaatatcctgacctttacggcgcgtcaggttgagcattggcatgcacgttccgtataccgtcaggataaactcctgcacgccggttcccagaccttcataggtaaacatcacatattcgccgccctgcagcatcaccggatgccccgtcagtacatagccatctgcctgatcctgggctaacgcggtggtatagaatacctcttgctcgtcgtctttatcctgactcggacgcgtttcattcaggccgtagagcaccggcggaatggtcggcgcgttgccgagaaaatcgtgccagaactgataacgcatttcatggcggaaatcagagatttgctccaggctacaggagtagctctgggtaacaccaatcagcggcgtatcttccagggtgacaaatttgtgctctggcatagtgaattcacccaggcgtagcggcgggcgaataccaaaggcgctccattcaggagaacggcggtaaagtgcaggagtctgggcaaactgcttcttgaatgcgcgggtaaatgtctgttgagagtcgaagcggtattgcagcgcgatgtccagaatcggacgcgcagtcaggcgtagtgcgaccgcgcttttgctcaaacgacgagcacgaatatacgcgccaatagcatggccagtgacatctttaaacattctctgtaagtgccacttggaataacctgctttcgccgctacattgtcgaggctcaggggctgatccagatgaccttccagccagattaaaaggtcgcgaataatgccggcctgatccataaaatatcctcatcctttcaacaacgagcacctgacatcaggtaattggataatagcattttttgctgttttagcattcagtgtttttttcttagtagagtatgttttagggcttgacggaaataaaagtattgagattttgttcttaatcaatatgttatttaccgtgacgaactaattgctcgtgtaatagataaaaatggtaacaatatgaaatacaagcatttgatcctgtctttaagcctgataatgctggggccattggctcatgcagaagagattggtagcgtcgacaccgtatttaaaatgatcggcccggatcacaaaattgttgtggaagcctttgatgatcccgatgtgaaaaatgtcacctgttatgtgagccgggcgaaaaccggtggtattaaagggggattgggtctggcggaagatacctccgatgcggccatttcttgtcagcaagtcgggccgattgaactgagcgatcgtattaaaaacggcaaagctcagggcgaggtagtattcaaaaaacgcacgtccctggtctttaagagcttacaggtcgtgcgcttttatgatgccaaacgcaacgcgctcgcttatctggcttactccgacaaagttgtagaaggtagcccgaaaaacgcgattagcgcggttcctgtcatgccgtggcggcaataacagaggcgatttatgcaacgggaaacggtctggttagtggaagatgagcaagggatagccgacacgctggtctacatgttgcagcaggaaggttttgccgtcgaggtctttgagcgaggcttgccggtgctggataaagctcgcaagcaggtacccgacgtcatgattctcgatgttggtctgccggatattagcggctttgaattgtgccgccagttactggcgctccatccggcgttacctgtactgttcctgacggcccgaagtgaagaggtcgatcgcctgcttgggctggaaattggtgctgacgactacgtggctaaaccgtttagtccccgcgaagtgtgcgccagggtgcgcaccttactgcgtcgggtgaagaagttcagcacgccgtctcccgtcatccgtattggacattttgaattgaatgaacccgcggcgcagatcagctggtttgacacgccattagcgctgactcggtatgagtttttattgttgaagacgttactcaagagtccgggccgcgtctggtcccgccagcaactgatggatagcgtatgggaagatgcgcaggacacctacgatcgcaccgtcgatacccacattaaaacgctgcgtgccaagctgcgcgccatcaaccccgatcttagtccgattaatactcatcgcggcatgggatatagcctgaggggcctgtaatgcgtatcggcatgcggttgttgctgggctattttttactggtggcggtggcagcctggttcgtactggccatttttgtcaaagaagttaaaccgggcgtgcgaagagcaacggaggggacgttgatcgacaccgcaacgttgctggcggagctggcgcgtcccgatttgctctctggggacccaacgcatgggcaactggcgcaggcgtttaatcagctacaacatcgcccgtttcgcgccaatatcggtggcattaacaaagtgcgcaatgaatatcatgtctatatgaccgatgcgcagggcaaagtattgttcgatagcgcaaataaagccgttggacaggattatagccgctggaatgacgtctggctaacgttgcgtggtcagtatggtgcgcgcagcacgttgcaaaatcctgccgatcccgaaagttctgtgatgtatgttgccgcaccgattatggacggcagccggcttattggcgttttgagcgtaggcaaaccgaacgcggcgatggctccggtcattaagcgtagcgagcggcgaattttatgggccagcgccattttgttggggattgcactggtgattggcgcaggcatggtttggtggatcaaccgctctattgcccggctcactcgctatgctgattccgtcactgacaataagcccgttcctctccccgatctcggtagtagcgagttgcgtaaactcgcgcaggcgctggaaagtatgcgcgtgaagctggaagggaaaaactatattgagcagtatgtttacgcattaactcatgagctaaaaagcccactggcggcgattcgtggagcggcggaaattttacgcgaaggtccgccgccggaagtggtggctcgttttactgacaacattctgacgcaaaatgcgcgtatgcaggcattggtagaaacgttactacgccaggcaagactggagaatcgtcaggaagtcgttctgactgctgttgatgtggcggcattattccgccgcgtcagcgaagcgcgcaccgtgcagttggcagaaaaaaaaatcactctgcatgttacgcccaccgaggttaacgttgctgctgaaccggcgttactggagcaggcgctgggaaatttactggataacgccatcgattttacccccgagagcggttgcatcacgctaagcgccgaagtggatcaggaacacgtcacgcttaaggtgctggataccggtagtggtattcctgactacgcgcttagtcgtatttttgaacgcttttactctttgcctcgtgcaaatgggcaaaaaagcagcggtctggggttggcgttcgtcagtgaggtcgcccgtttgtttaacggcgaagtcacgctgcgcaacgtgcaggaaggtggcgtgctggccagccttcgacttcaccgtcacttcacataacttcaaattcttcccacatagtcttcgtatcctgctgccattgcaaaggagaagactatgttgaaatcccccctgttctggaaaatgactagcctgtttggtgcagtattgctgttgttgattccgataatgctgattcggcaggtgattgtcgaacgtgctgattaccgtagcgatgtggaagatgcgattcgccaaagtaccagcgggccgcaaaaactcgttgggccgctcatcgctattcctgtgaccgagctttatacggtgcaggaagaggataaaaccgtggagcggaaacgaagttttatccatttttggttacctgagagtttgatggttgatggcaatcagaacgtggaagaacgcaagatagggatttataccggtcaggtctggcacagtgatttaacgttaaaagccgatttcgatgttagccgtcttagcgaactcaacgcgccaaatatcaccttaggcaagccatttattgtgattagcgtcggggatgcgcgtggtattggtgtggtgaaagcgcctgaagttaacggaacggcgctgaccattgaacccggcaccgggttagagcaaggcgggcagggcgtgcatatccctttacctgaaggggactggcggaagcagaacctgaagctgaatatggccctgaatttaagcggtaccggcgatctttctgtggtgcctggcgggcgtaatagcgaaatgaccttaaccagcaactggccgcatcccagttttttaggtgattttctaccagccaaacgggaagttagcgagagtggttttcaggcgcactggcaaagcagctggtttgctaataatctcggtgagcgttttgctagtggcaatgataccggctgggaaaacttcccggcgtttagcgtcgcagtaacgacgccagccgatcaataccaattaactgaccgggcgactaagtacgccattctgctgattgcactgacttttatggcgttctttgtttttgaaacgctcaccgcgcaacgtttacacccaatgcaatatttgctggtggggcttagtttggtgatgttttatttgctcttgctggcgctttctgaacataccggttttaccgtggcatggataatcgccagtctgattggggcgataatgaacggtatttatttgcaagcggtattgaaaggttggtgcaacagcatgttgtttaccctcgcgctgttgttgctggatggtgtgatgtggggactgctcaactctgccgatagcgcgctgttgttgggaaccagtgtgctggtggtggcgctggccggcatgatgtttgtgacccgtaatatcgactggtatgcgtttagtctgccgaaaatgaaagccagtaaagaagttacaacggacgatgagttacgtatctggaaataaggttgaaaaataaaaacggcgctaaaaagcgccgttttttttgacggtggtaaagccgattaatcttccagatcaccgcagaagcgataaccttcaccgtgaatggtggcgatgatttccggcgtatccggcgtagattcgaaatgtttacgaatacggcggatcgtcacgtctacagtacggtcgtgcggtttcagctcacggccggtcattttcttcagcagttcagcacgggactgaattttgcctgggttttcacagaagtgaagcatggcgcggaactcgctgcgcggcagcttgtactgctcgccatcagggccgatcaagctacggctgttgatgtccagttcccaaccattgaacttgtagctttcaacgctacgacgttcttcgctgacagtacccagattcatggtacgggacagtaggttgcgtgcacgaatcgtcagttcacgcgggttgaacggtttggtgatgtagtcatctgcaccgatttcgaggccgagaattttatcgacttcgttgtcacggccagtcaggaacatcaacgcaacattcgcctgctcgcgcagttcacgcgctaacagaagaccgttcttacccggcagattgatatccatgatcaccaggttgatgtcatattcagagaggatctgatgcatttccgcgccatctgtcgcttcgaaaacatcatagccttccgcttcgaaaatacttttcaacgtgttgcgtgttaccaactcgtcttcaacgataagaatgtgcggggtctgcatgtttgctacctaaattgccaactaaatcgaaacaggaagtacaaaagtccctgacctgcctgatgcatgctgcaaattaacatgatcggcgtaacatgactaaagtacgtaattgcgttcttgatgcactttccatcaacgtcaacaacatcattagcttggtcgtgggtactttccctcaggacccgacagtgagtaaaacggctgtcatcctaaccattttaacagcaacataacaggctaagaggggccggacacccaataaaactacgcttcgttgacatatatcaagttcaattgtagcacgttaacagtttgatgaaatcatcgtatctaaatgctagctttcgtcacattattttaataatccaactagttgcatcatacaactaataaacgtggtgaatccaattgtcgagatttattttttataaaattatcctaagtaaacagaaggatatgtagcattttttaacaactcaaccgttagtacagtcaggaaatagtttagccttttttaagctaagtaaagggctttttctgcgacttacgttaagaatttgtaaattcgcaccgcgtaataagttgacagtgatcacccggttcgcggttatttgatcaagaagagtggcaatatgcgtataacgattattctggtcgcacccgccagagcagaaaatattggggcagcggcgcgggcaatgaaaacgatggggtttagcgatctgcggattgtcgatagtcaggcacacctggagccagccacccgctgggtcgcacatggatctggtgatattattgataatattaaagttttcccgacattggctgaaagcttacacgatgtcgatttcactgtcgccaccactgcgcgcagtcgggcgaaatatcattactacgccacgccagttgaactggtgccgctgttagaggaaaaatctagttggatgagccatgccgcgctggtgtttggtcgcgaagattccgggttgactaacgaagagttagcgttggctgacgttcttactggtgtgccgatggtggcggattatcctagcctcaatctggggcaggcggtgatggtctattgctatcaattagcaacattaatacaacaaccggcgaaaagtgatgcaacggcagaccaacatcaactgcaagctttacgcgaacgagccatgacattgctgacgactctggcagtggcagatgacataaaactggtcgactggttacaacaacgcctggggcttttagagcaacgagacacggcaatgttgcaccgtttgctgcatgatattgaaaaaaatatcaccaaataaaaaacgccttagtaagtatttttc
